United States Patent Application Publication US 2007/0048818 A1 - sequence listing, part 9

SEQ ID NO: 12699 - DNA, 4710 bp, Homo sapiens
gaaatatatatatgagaaactaaagtcatttcccataacttaaaagaggcatagaatatttcgagttgaatacagtttctgcctggcttgttttcttctgcctcttttttttaaagctcatctttgggtgaaaaattgtcgggatcttctgcagtccagctacaacaaacagcgctttgatcaacctttagaggcttcaacctggctgaagaatttcaaaactacaaatgagcgcttcctgaaccaggtgactagactcccagaagttgagtgctaggtagtccttacatggattctttgtgccctgagtaccaatagactatggagaactgatactggagttggaataactgtatcatttttaatttctttcatacgttttgctcacagtggactcataacttgaaactcatttatccatgtgaaataaataggcaacagtaagttgttcccattttgtgggtagcaaagtgaaatccagttgattcattgacttttcaaggtacagcctccaatccctcgcaagcacatttccaactacatgattttctccagacaatatctttttagggaaccagaaatgtattggaaaaattcttctttaccctggtgattcttagataccctgtctagaccaggggccttcaactctggatataaagcagagtcacctaagagcttgttaaaaatgcagatgccagagtctcattctggacattttcatcagaatcccttatgtatgtttattcaaggctccaagcagaaatggattagaaagcattcactttggtcaggcacaggggctcacacctgtaatgtcagcactttgggaggccaaggcaggcagatcacctgaggtcaggagttcaagatgagcctggccaacatggtgaaatcccatctctactaaaaatacaaatattagccgggtgtggtggtgcacgcctgtaggcccatctattcaggaggctgaggcaggggaatctcttgaacctgggaatcagaggtttcagtgagccgagatagcgccattgtactccagcctgggtaacagagcgagatatggtctcaaaaaaaagataaaagaggtcaggcgtgtggctcagacatgtaattccagcattttgggaggccgaggtgggcagatcacctgaggtcaggaattctagaccagcctggccaacatggcgaaaccccatctctactaaaaatacaaaaattagccaggcgtggtgacacacgcctgaaatcccagctacttgggaggctgaggcaagagaatcccttaaacctgggaggtggatgttgcagcgagctgagatcatgccactgcacttcagcctgggttacagagaaagaagctgtctcaaaaaaaaaaaaaaagaaagaaaagaaagcattcacttctacattgaggtctcttacagaacctgaacaatagattaaaatgaactcctgttaaccttagcctccaaccttttcaagggatggtttcacccttaggccaagtagccttttttttggtttttattttctttgcttgcttttagataaaagttcaagagaagtatgtctggaataagagagaaagcactgagaaagggagtcctctgggagaagtggttgaacaggtataagaaaaaacactgaatgtgtaacatgcgataacaagagaaggcctctggtagcactacaatccactgtctctcccaatagggcataacacgggtgaggaacgccacagatgcagttggaattgtgctgaaagagctaaagaggcaaagttctttgggtatgtttcacctcctagtggccgtggatggaatcaatgctctttggggaagaaccactctgaaaagagaagataaaagcccggtaggaaaactgggtgtctctatcttgtttctctgatttctgattccatcagtatggaggctgggtcttagccttgtagaccatgcaatatgttttcttgccctaggaatatttgaagataaacagtaaagagctgggtgcagtggctcacgcctgtaatcccattggctcacgaggctgaggtgggaggatcgcttgaggccaggagttcaagactaggatgggcactatagcaaggcccctgcctctaaaaaaataagaaattagccggtagctggcatggtggcacacacctgtagtcactgctactggaaggctgaggccagaggatcacttgagccctggagttcaaggttgtagtgtggcatgattgcaacactgcacaccaacctgggtgacagagtgaaatcctgtctcttaaaaaatatatatatggctgggcacagtggctcatgcctgtaatcccagcacttggggaggctgaggcgggcggatcacctgagcttggagttcgagaccagcctgaccaacatggagaaacccatctctactaaaaatacaaaattagccgggcatggtggtgcatgactgtaatcccagttactcgggaggctgaggcaggagaatcgcttgaacccaggaggcggaggttgcagtgagccgagatcgccatatatatatattcatatatatgtatatatacacacatatatattcatatatgtatatatacacacatatattcatatatatttatatatacatatattcatatgttttcataatatacgaatatacctatatgttcatatatgtatatataatattcatatatgtatatatgtatatataatattcatatatgtatatatgtatatatacgtatatatgcacacatacatattcgtatatgcatatgcacacatacatattcgtatatatatgtgaagataaacagcaaggcctggtgtgatggctgataaatcccagcacttttaggaggccaagaggtgatttgcttgagtccaggagtttggagtttgaggtcagcctgggcagcacagtgaaaccctgtccctacaaaaaatataaaaaactagctgggcatggtggtttgcacctgtatgtagctccagctacttggaaggctaagatgggaggatggcttgagcccaagaggcagagcccgcaatgagtggagatcgtgccactgcattccaggctgggcaacagaatgagactctgtctcaaaaaaataaaaaaaaagaaaagataaacagtaaaatggaatcagaggaggaggtaatgccaagagttccactattcattgaaaactaagggagtatgttgtggaaagagaatgacagcagaagctatgttttctttcttaatttttatctgtcttttgattcttttttcaaaatgagtctagatggtctaagcagaggagatcagaagcatcaaaatggggctggtttggggcagtgggtgtttttctcagtgactgttaatctccagaagcatggcagttctagggccagaggctacgtggcttatcctagagggagtaccttcaggtatacaattatgtcttagttgagggtgttaaaaaaattgttgtcaccaggtgcagtggctcatgcttgtaatcccagcactttggtaggccgaggtgggtggatcacaaggtcaggagtttgagaccgtcctggctaacacgatgaaaccctgtctctactaaaaatacaaaaatagtaggctgtgatggcgtgtgtctgtagtcccagctactcaggaggctgaggcaggagaatcgcttgaacccaggaggtggaggttgcagtgagcccaaatcgcgccactgcactccagcctgggcgacagagcgagactctgtcaaaaaaaaaaaaaaattgttgtcaattgtttcgggagaacatctaggaaaggcacgtgatgatctcttctctctttctgtccgatatgcagattgcccccgaggaattagcacttgttcacaacttgaggaaaatgatgaaaaatgattgggtaagtgcatatgatacctcacacatttcagaaagaaatgtattatcattttaaacatgttctactatttcattgctaatactttacagtctctaattttatggacagtaagttattatgtcttatttaattcctgtatctgtaccaagttagaaataaagtctgaattaaaatctatatatatgtggtttataatctttccaaagtaagtttattcaaaaccattttatttaaatattggcctaattttattttgcttgcagacatttaaagtgtttttgtatctccttaccgtctttggaaaagagtttgagacccacaaatatgtcatggtaaatttaaaatcaggtagcagtttattgtcagagccaaatctggaataaccaatttagttgccatttaactgtgctagaccacacttttgtaacactgtatgcccaagaaagaaaaaaaaaatctacagatgattaatgcagttttccatcctttttaactttttccagttcagccttttctcttttctttcagcatggaggcgccattgtgtcggctttgagccagactgggtctctctttaagccccggaaagcctatctgccccaggagttgctgggaaaggtcaagtcaaaggaaaatttgtttctacttagattgttatcctgtttaaagaaaaatatttttattaatctatgtattttgacataatttcagacttagagaaaaatcatattcctgtatgcccttcccctggattcctaaaatattaacttgatcatcattgcttta

SEQ ID NO: 12700 - DNA, 5775 bp, Homo sapiens; identical to SEQ ID NO: 7562

SEQ ID NO: 12701 - DNA, 738 bp, Homo sapiens; identical to SEQ ID NO: 7563

SEQ ID NO: 12702 - DNA, 852 bp, Homo sapiens
aaggcacgtgatgatctcttctctctttctgtccgatatgcagattgcccccgaggaattagcacttgttcacaacttgaggaaaatgatgaaaaatgattgggtaagtgcatatgatacctcacacatttcagaaagaaatgtattatcattttaaacatgttctactatttcattgctaatactttacagtctctaattttatggacagtaagttattatgtcttatttaattcctgtatctgtaccaagttagaaataaagtctgaattaaaatctatatatatgtggtttataatctttccaaagtaagtttattcaaaaccattttatttaaatattggcctaattttattttgcttgcagacatttaaagtgtttttgtatctccttaccgtctttggaaaagagtttgagacccacaaatatgtcatggtaaatttaaaatcaggtagcagtttattgtcagagccaaatctggaataaccaatttagttgccatttaactgtgctagaccacacttttgtaacactgtatgcccaagaaagaaaaaaaaaatctacagatgattaatgcagttttccatcctttttaactttttccagttcagccttttctcttttctttcagcatggaggcgccattgtgtcggctttgagccagactgggtctctctttaagccccggaaagcctatctgccccaggagttgctgggaaaggtcaagtcaaaggaaaatttgtttctacttagattgttatcctgtttaaagaaaaatatttttattaatctatgtattttgacataatttcagacttagagaaaaatcatattcctgtatgcccttcccct

SEQ ID NO: 12703 - DNA, 634 bp, Homo sapiens
tacatttttagtagagacaggatttcaccatattggccaggctggtcttgaactcctgacctcgtgatccacccgccttggcctcccaaagtgctgggattacagacgtgagccatcacacccggccaatgaaggaatttttaatggccaaatctaagatgatttgagcaccaaaataaaaagtgacagtaatgatttagattctattaaataaaaatccacaagaccataccagctgcggaggctccatgccaggtataactaaagtaatggatactaaaaccagtaggtggaagtttgagaagtaacaggatctttacctagtctcaaagtatatctctacaacatacatattaattccaaagcaaaataataactttactgaagagaaaccagatggacaacacctcagctaacagttccaaaatcattaccagtaatgggagaaatgtgcctcctgataggatgcactcactcagacatgtcatcacttctaacatcacttctattcaggaggaaacctcagacaaccccaaaaagtgacctacaaaatagctggcatgcacatgccaaaaacataaagatttcaaatgacaaagactgacagactgtcacagattaaaggagaccaaag

SEQ ID NO: 12704 - DNA, 852 bp, Homo sapiens; identical to SEQ ID NO: 12702

SEQ ID NO: 12705 - DNA, 127 bp, Homo sapiens
gggtgcggtggctcatgcctgtaatcccagcactttgggaggccgaggcaggcggatcatgaggtcaggagatcgagaccatcctggctaacatggtgaaaccccgtctctactaaaaatacaaaaa

SEQ ID NO: 12706 - DNA, 1189 bp, Homo sapiens
ttttttttttttgagacggagtcttgctctggcaagactggagtgcagtggcgcgatctcggctcactgcaagctccacctcccgggttcacaccattctcctgcctcagcctcccgagtagctgggactacaggcgcccgccaccacgcccagccagttttttgtatttttagtagagctggggtttcaccatgttagccaggatgggctcgatttcctgacctcgttatccacctgccttggcctcccaaagtgctgggattacaggcatgagccattgcacccggcctcagctttactttcctaacagggatctgatagctaaaggaaaagcctttgccagtcacgatggctcaaacctataatcccagcactttgggaggctgaggctggaatattgcttagagcccaggaggaggctgcagtgagctgtgatcgcaccactacactctagcgtgggcaacaaagcaagaccctgtctcaaaaaaaaaaaaaaaaaagaagaagaagaaaagcctttactccagatgtagagcagactgagctcatccatcatgatttcttcgtgatattactgccaagcagattataaggtgaagtcaatgtgacaaaaggaaattcggctaaaagcttcctgaagccttttgatgctaagcagtccttcttttgatatttaatacccatggacataaacttctgccttagaggtcgccatggagttttgttttgttttgttttgttttgtttttgccatctgttaacagtcctgagtacccatagagccttttactatttatcagcattctagagtcgtcagtatggattgtcaaaacttgcatttgtctcttttttgttcagtgttgtgtgcatccacattttctttcttttttaaacaaccctgcttatgtaacatccacattttctgacttacctttcaaacctgccagaaagcagaagtgatatttaatacacttggtatgttttatatattgattctaatgataatgtttagtctaagatggacctgacaaggccaggcatagtggttcaacagcactttgagaggctgaggcaggatgattgcctgagcctaggagttcaaggttacagtgaactgtgatcacatcctgccttctagcctgggtgacagagcaagaccctgtctcaaaaaaaaaaaaaaaaaagaaa

SEQ ID NO: 12707 - DNA, 3222 bp, Homo sapiens
gaatagtttcagtgacattatgtcattgaagaccttagaagatttccctcgctaaaggagataaagcgactggcacaacatgtatttctctgagtaattagaagtgttcttttctggctgtactgaagggactttcatgatttcttcgtttttgtactcttagttttataatattgcatagtagctaaggcctggctgtagcagttataaactgttctgcaagtgcgggaagtaatagttattcctatctcaaggatgtggggtttaaatgggttagtgcacaaaaggacatttattaaatttagtcataatcatctcaaggacatggtaagtgaaagagtgtacataaagtacttaatgtaatgtttgctacttaatgttcaataactcaaagagaccaccaccactactacattttacttttattagtaattaataataattaataattagtaattcagtggtaattagtatactaccaaagaaagtacttgagcagaagagccaaaattcaaaccatagaatcattttactgtgcttttattctacctcaaacactaatctccaggccttggataaagggattatttctctgaaggggaaagttatcctctttttgcccaagtcacacttgtgtcatttcttatactgtaaacatgtggttccaattctgaggtattttcccggtttgtaggacccaaaaagaagttaggcttgagaaattttaagtgaagagaacaattctagttcagagtgattggctcttcctaaaagctgacatttgactgaaaattttgaggggagggaaagaaacaataccttttacggcatgtaataggaagaagacctggattttagttgctgctctgatgtcccaacttgggtaaggcaacataacataaatgtcagtttcttcagatttgtgatgaagctgataatccatgctcagcttcctttatgggtctcttgcctatcaaataaggtacagtatgtgaagatacattgcagattatcttatgcattgcttcaggggatgattaaaccatcctttattatagccagagtctagtctaagggaagaaggtcattctctataccagtgaaggctccatccaaaccagtgtttgggggcatagtcataattgaaaaatgattgttttccttatctgtaagacaggtaaatggtattaatcctcaggtggttgtgaggattaagtgatacatgtaaaaaaaagaaagctttggatagtacctattataagaaactcagtgttgctgcaatgtatgtattataatggatttgaaatttgccctaaccaagagtcacagacagaaaaaaggaagttaatgtatctcttgatcactatcaagatgtggtattgaaccttcaagatcctttcagggaatatgtgagatcaaaatttttatactggcactatgatgtatttgccttttcctcatattcacaagtgaacagtggagttttacagaagctatataatgtcatgacatcactgatgggtaatagaatgtgtgcttgtatattccgaaactttcagttccaatttcttcgatcaatgtaatcctcataagtaaaagttatttgaggacctcagacatttttaaaaatgtaaagggggtggggtcaggctcagtggctcatgcctgtaatcccagcattttggaaggccgaggcgaacggatcacttgaggccaggagtttgaaactagtctggtcaacatggtgaaaccccgtctccactaaaacaaaaagttttctggatgtggtggcacacatacctgtaatcccagctactttggtggctgaggcatgagaatcacttgaacccagaagacaggttgcagtgagccaagattgtgcccctgcattctagcctgggtgacagtgagactgtctcaaaaaataaaggtgtacagggattgtatatttgacaacttggtatgtaggatgtgctacctctaatgttccatgctgttacttagttttcactcactactatattttggagatttgttcatattgctctgtgtacatttaattcttcagtgtgtatccaccacatttaacttattcacttacagaactatgcaagaatttctctggtaaatttcactaagtacttatgtacttttcagaacgattgtgagtttacacccctaccagcaggactgagttgagtacccatttcctcacatccttgccagtacttcatttgcctaatttttgccattctcataatgtggcaattgttcaattttgcatttcttccattttatttttttgcatctctgcttttcttttggttagctttgccagttctgcctattatattaatctcccagaatcagcttttagttttgttaaatctctgacatgtttcgttgattcctgctttcatcttaaacatttcttcgttgttaatttgtgtttgctataaaataagcaacatcttaaatgcttgatttgctttcgatgtttattctgtaataagatatttaaagatataattttttccctaaatgctttattagacttttctcataagttttgactggtactgttttcattgttatttaattttgtgttttttaacttctttcatgatttccttttaactgaaggttttcttagatatttagtttgctggtatattcttttaaaattgtatcattgctttctttctatattggattattgtcagagaacatgatttgcatgatattaactttttggagtatattgttgcatctttgtggcctagtacatagttaatttagtgaatgcttccagttgtacttgaaaagaatgtatattttctgattattgagggtaaatttctctatatatgttttcctgtttaataaatatgtagctatgtgcttatgttttgactgctcggttaattatttttgagaaatatatgtgttaaagactccatatttctgtacacaactgatacctggtatttgctcattttaaggtctttttagtaatgggcgaagtatagagaaagtagagctggttcatccatcacttgggtcaaaccctccatccttaaacagttgctcatgtgcaggtggacgcatcattgaagcttttctttctttgggcaccagagtcagggatagattcaggccccaaaagaccccacggtacttcctgggcccttgggctctgtcctgaacttctgtgtcctgaaa

SEQ ID NO: 12708 - DNA, 7217 bp, Homo sapiens
ggggtgaggaggagggacagtgtattagagattttactgttcaaaatgtagacttcctcagttttcagtaaaatactctaccctgtctatatgtggattcccctattccagactgattcacccttttcagtgagttagtcgtgacatttcttacactgtgagggggagtggtaattactttacagggaggtatggggccatggtgtttgactcttctttcaaccacttctgggttttttagtgaaaacctctatctaacactgatactttcatttctgttgtctattgagtcagttaacactgatccatttatttttcagttcccaaaatcttgctttgccattgcttctattttattgtctgggggtgtttaacacctgtttcattttttacagtcatttagtttccagattttagtaagggacagaggggaatagatggactcatttcatgatgtagaaacaaatactccctgtcttgtcttacatgaaaaattattcttaaactaggccttatctttgagaacctgatcaaagtataaaaaatactttttggctttatttctttagtgagtcactattccatattttgaaggtgttaagaggtatggtaaaggtggtacttgaacatttccaagcaaacgtgtgatgaaatctttcatcaatgtcttagcaatggtatatgatttttttagtcttagcaattttagataagttttttttttgtcttgtttttttgagacggagtcttgctctgtcgcctaggctacagtgtagtggcgtgatctcggctcactgcagcctctgcctccgagcggggtccagcgattctcctgcatcagcctcctgggtagttgggattacaggtgcatgccaccacacccaactgatttttgtatttttagtagagacagggtttcaccatcttggcctgactggtcccgaactgatctcaggtgatctgcccacctcggcctcccaaagtgctgggattacaagcgtgagccactgcgtggcctgaggtaagattttataagaagcctacaaagccctaatttttacattaagaacattaagtgcttctgatagttttaagttccgtagtctttatttcaaagaattatttcattctgaatttctatttaaattagtctagaatatgtttataaatttatttacatttggttgaaatgtattcttaaaacttattccacagtttccagtttgaggataaatgaggtctaaagacagtatgaacttgttaataatttttcctattgtcctttttagaaatcttacatatcctttagcctaattatagattggccctgcaagcatgtcactgtatcttttatgtcttcctgagtcttagcactttaaattcttctatatccttcactgtctttcttacagcaccctaaaagagtagcatgtgaactgttgctcttctctaaggtattttaggacatttttaaaataatatatgagtggttgtcatgctaaatactgtctaccacaactcatacaattaaagtggtcaaagaaaggtctctttcatttcttttttcattttaaaaagaaatgttatttgtaaaacagtatagtcataacacagatatggcagttttttagtttttttttttctttttcttcactgtgtcatccaggcagtagcgtgattataattcactgcagcctccaactcctgggcttgagggatcctctcactgagccttctgagcagctgggactgcaaacgtgtgccagtactcctggctaatttttaaatttttttgtagaattgaggtgtttttttaaatttttttaaagccttgtttgcaaactgttgcaacttctggcggctgcaacttctggcctcaagcaatcttcctgtcttggcctcccaatagcataagctaccgcacccagcccacaattttctttcagtacaatataaacatcttgcaagcgctagcttgatttacactttttgtctgtatccacctctttttttttttttttttttttttttttttgagatggagtttcgctcttactgcccaggctggagtgcagtggtgcgatcttggctcattgcaacttccacctcccaggttcaagcgattctcctgcctccatcttccgagtaggtggcattacaggcatgtgccaccacgcccggcgagttttgtatttttagtagagatgaggtttctccatgttggtcaggctagtctcgaactcctgacctcaggtgatccacccaccttggcctcccaaagtgctgggattacaggcatgagccactgcgcccagtatatatccaccactttaccatccacattagcatttcattagcttctctttgcccttttagttaataaccccatctcagggtgattcactttcataatccgtattaccatggattaattctgcatagcaaaaactatgataggtgtgttaagtaatgaagtttggggaatgttaataagatgatttctcttactgtagatgaaatacatcgtaagagaatccctcgtgagaccagatcagttacatgtatatcttgcctctcttaagtctctaccatttattactgtacttgagttaggatttggaagtgccactgaacactaaaattattctgtctgggtatttgaatggtgtgagacaaaaatccattttaatgttttatcaagttgagatgtctcacatgagtagttagtgctgagaatcagacacaggcacatttgggagcatggcgtggcaagaagctttgctttttcctgttcctattgtactcaaacttgtttctacatttttcattgatttctcttcgtactagcactagggcgcaagagaagccgtactggaatattacactactcagcacaagacaggtttaatctttttcttgggggacaagattggaaaattgaggtctgagcagacctgaagagaggcatccagcaactctgagattaaattcatcattgatcaattcgttattgtttggaattgacgtttagctgtgttcctcactcagatacgtgcatgatagctgcttgctaatttggtcttagctcacatttcacctagaatgtatggtctccctctcccctgcaaaatatcccactgttgctaatctgtctgcctcataatttccatgagattgagcatcttgtttgttttgtcaccactatataacagcatgttggaaacaaagcagtaataaagctagaaaaaccaagcgaatacactggattaaaaaaaatactgtttcctagaattaaagaaataaatgaggccgggcgcagtggtgcctgtaatcccagcagtttgggaggctgaggctagtggatcatgtggccgagatcgcgtcactgcactccagtctagcaacagagcgataccttgtttcttacttaaaaaaaaaaaaagacctcatttgttaactgttaaacagaaaacaagaaattccctatacctgtatgcattatagagcaaataagagcatcaaaaacaatcttagaaatctttcagagaaaggtcacctacaaaggaacattgatcagataatagatttttttttttttctcagatggagttctgctcttgtcgcccagactggagtgcaatggcacgatgttggctcactgcaatctccgcttcccaggttcaagcagttctccagccttagcctcccaagtagctgggattacaggctcccactaccattcccagaatttttgtattttaattagtagagacggggtttcgccatgttggccaggctagcctcgaactcctgaactcaggtgatctgcctgcctcggcctcacaaagtgctgtgattacagggtgtgagccactgcacctggccgataacagatgttttaatagtaagataaaaagtaaaatttccagtgtgtcgaaggaagaaaattacagcctagaattttatcttcatgtacattatttaagtgtgagggaatagtttcagtgacattatgtcattgaagaccttagaagatttccctcgctaaaggagataaagcgactggcacaacatgtatttctctgagtaattagaagtgttcttttctggctgtactgaagggactttcatgatttcttcgtttttgtactcttagttttataatattgcatagtagctaaggcctggctgtagcagttataaactgttctgcaagtgcgggaagtaatagttattcctatctcaaggatgtggggtttaaatgggttagtgcacaaaaggacatttattaaatttagtcataatcatctcaaggacatggtaagtgaaagagtgtacataaagtacttaatgtaatgtttgctacttaatgttcaataactcaaagagaccaccaccactactacattttacttttattagtaattaataataattaataattagtaattcagtggtaattagtatactaccaaagaaagtacttgagcagaagagccaaaattcaaaccatagaatcattttactgtgcttttattctacctcaaacactaatctccaggccttggataaagggattatttctctgaaggggaaagttatcctctttttgcccaagtcacacttgtgtcatttcttatactgtaaacatgtggttccaattctgaggtattttcccggtttgtaggacccaaaaagaagttaggcttgagaaattttaagtgaagagaacaattctagttcagagtgattggctcttcctaaaagctgacatttgactgaaaattttgaggggagggaaagaaacaataccttttacggcatgtaataggaagaagacctggattttagttgctgctctgatgtcccaacttgggtaaggcaacataacataaatgtcagtttcttcagatttgtgatgaagctgataatccatgctcagcttcctttatgggtctcttgcctatcaaataaggtacagtatgtgaagatacattgcagattatcttatgcattgcttcaggggatgattaaaccatcctttattatagccagagtctagtctaagggaagaaggtcattctctataccagtgaaggctccatccaaaccagtgtttgggggcatagtcataattgaaaaatgattgttttccttatctgtaagacaggtaaatggtattaatcctcaggtggttgtgaggattaagtgatacatgtaaaaaaaagaaagctttggatagtacctattataagaaactcagtgttgctgcaatgtatgtattataatggatttgaaatttgccctaaccaagagtcacagacagaaaaaaggaagttaatgtatctcttgatcactatcaagatgtggtattgaaccttcaagatccttttcagggaatatgtgagatcaaaatttttatactggcactatgatgttatttgccttttcctcatattcacaagtgaacagtggagttttacagaagctatataatgtcatgacatcactgatgggtaatagaatgtgtgcttgtatattccgaaactttcagttccaatttcttcgatcaatgtaatcctcataagtaaaagttatttgaggacctcagacatttttaaaaatgtaaagggggtggggtcaggctcagtggctcatgcctgtaatcccagcattttggaaggccgaggcgaacggatcacttgaggccaggagtttgaaactagtctggtcaacatggtgaaaccccgtctccactaaaacaaaaagttttctggatgtggtggcacacatacctgtaatcccagctactttggtggctgaggcatgagaatcacttgaacccagaagacaggttgcagtgagccaagattgtgcccctgcattctagcctgggtgacagtgagactgtctcaaaaaataaaggtgtacagggattgtatatttgacaacttggtatgtaggatgtgctacctctaatgttccatgctgttacttagttttcactcactactatattttggagatttgttcatattgctctgtgtacatttaattcttcagtgtgtatccaccacatttaacttattcacttacagaactatgcaagaatttctctggtaaatttcactaagtacttatgtacttttcagaacgattgtgagtttacacccctaccagcaggactgagttgagtacccatttcctcacatccttgccagtacttcatttgcctaatttttgccattctcataatgtggcaattgttcaattttgcatttcttccattttatttttttgcatctctgcttttcttttggttagctttgccagttctgcctattatattaatctcccagaatcagcttttagttttgttaaatctctgacatgtttcgttgattcctgctttcatcttaaacatttcttcgttgttaatttgtgtttgctataaaataagcaacatcttaaatgcttgatttgctttcgatgtttattctgtaataagatatttaaagatataattttttccctaaatgctttattagacttttctcataagttttgactggtactgttttcattgttatttaattttgtgttttttaacttctttcatgatttccttttaactgaaggttttcttagatatttagtttgctggtatattcttttaaaattgtatcattgctttctttctatattggattattgtcagagaacatgatttgcatgatattaactttttggagtatattgttgcatctttgtggcctagtacatagttaatttagtgaatgcttccagttgtacttgaaaagaatgtatattttctgattattgagggtaaatttctctatatatgttttcctgtttaataaatatgtagctatgtgcttatgttttgactgctcggttaattatttttgagaaatatatgtgttaaagactccatatttctgtacacaactgatacctggtatttgctcattttaaggtctttttagtaatgggcgaagtatagagaaagtagagctggttcatccatcacttgggtcaaaccctccatccttaaacagttgctcatgtgcaggtggacgcatcattgaagcttttctttctttgggcaccagagtcagggatagattcaggccccaaaagaccccacggtacttcctgggcccttgggctctgtcctgaacttctgtgtcctgaaa

SEQ ID NO: 12709 - DNA, 85 bp, Homo sapiens
tttttgtttttttgagacggagtctcactctgtcgcccaggctggagtgcagtggcgcgatcttggttcaccgcaagctccgcct

SEQ ID NO: 12710 - DNA, 85 bp, Homo sapiens; identical to SEQ ID NO: 12709

SEQ ID NO: 12711 - DNA, 32720 bp, Homo sapiens
cagccagtaccttttcaacaaccaaagcacttcactggaggagtgatgcgatggtaccaagtaaaaggcatggaatggcttagggtaatgaattggaatttttaatacaagatactggttttatttctatagtagcctaatgatttgaggtaccacaacttgagtcatttctatcatgtttcactattatacatttgtatgtggatacttgctttctgatttctttaccctgaatttttagaagtagaaattaccttgttaatggcttccagcacttttatggctttgataaaggactttccagtgttgttataatttatggtgtgaatatatcagctttaacataattctcatctttgggtgtgattttttaaagagaagaaataaaatattgtaatcctgtagttgtttatatccaagtttaaatacagtatctattattttgtccagatgctttgggaaaatggaattaatggcattttagcagatgaaatgggattgggtaagacagttcagtgcattgctactattgcattgatgattcagagaggagtaccaggaccttttcttgtctgtggccctttgtctacacttcctaactggatggctgaattcaaaagatttacaccagatgtaagacatgcttccttatgttaaaattataattttacatgttttcttatgctttgttgtagtaggaattaaattgtagaactcttataattatattggtttctgtataaatattttgtctgatttgacttactcaatctgcacaataccctaatttaaatttatatagtataggttttggaaatccctgacatctttcctaaaatattcctgaatgattttcagtgcattggtaatttgattcgactgagacagacttaggtagagattttattaaaaattctgcttgttcttcacttgatctttgccaaaaggctaagaagagagttttctgttttttctgtacttgttaccttctgcaatttttttttttttttttttttttgaaatggagtctctgttacccaggctggagggcagtgatgcagtcttggttcactgcaatctctgcctcccatgatgaagcaattcttgtgcctgagccaccggagtagctgggattacaagcatgtgccaccatgcccagctaattttatgtttttagtagagacgatgtcttgccatgttggccaggctggtcttgaactcctggcctgaagagatctgcccactttggcctctcaaagtactgggattatagacgtgagccactgtacctcccgggcccagcccttctgcacatttttgccttatgagaaatatatatattctagacgtagtatcaccatctgtctcattttatatatttatatatatattatttatttatttattttgaaatggagtctgtctctgtcaccatgctggagtgtagtagctgggactacaggcgcacaccacaaggccaggctaattttttgtattttggtagagacaggatttcaccatgttggccaagatggcctctatctcctgaccttgtgatccgcccaccttggcctcccacagtggtgggattacaggtgtgagccactgcgcccagcctatatgtgttttatgtatttgtaggttttttgttggggggggggttgtgtttgtgtgtgtgtgtgtgtgtgtgtgtgtgtgtgtgtgtgtgtgtatgacagagtttcactgttgttgcccaggctggagtgcaatggcacgatctcggctcagtgcaacctccgcctcccgggttcaagcgattctcctgtctcagcctcccaggtagctgggattacgggcgtgcgccaccacgcctggctaattttgtatttttagtagtgacggggtttctccatgttggtcaggctggtctggaactcccgacctcaggtggtctgcccgcctcagcttcccaaagtgctggggattacaggtatgagccatcccacctggcccgtctatttgtttttatgcctttttttttgtcttcagacaggatgttgctctgttgctcaggctggagtgcagtggcgtcattctggctcactgtggccttcacctcccaggctcatgtgagcctgctatctcacacgcctgagtagctcatgtgaacctcccatctcactccactgggtgagtagctggcactacgggtgcgtaccaccacaccagctaatttttgtattttttgtagagatgggatttctccatgttgctcaggttgatctcgaactactggactttagagatcggcttgccttggcttcccaaagtgttgagattataggtgtgagccattgtgctgggcctgactttgtttttttgtttgtttttttttcattttctcccataatagttcaatgatttgttagaattgcttggcttattttgctatagaaaaatagaaataaaattttttaaaattatattttttccctcagaatgatttatattttctaaatagtcaatatttacattttgttcttaagtctgataaaaatcaatataaaatttttcagatccctacaatgttatatcatggaacccaggaggaacgtcaaaaattggtaagaaatatttacaaacggaaagggactttgcagattcatcctgtggtaatcacgtcatttgaaatagccatgagagaccgaaatgcgttacaggtacaaatgatcttcattggtttctttgtaatacataaaacatgcttttcttcatttatatcactttctcaccatctgggagcatttgtctaatttttttttgttgtcgaaataatagattatattgtgcatatacctgtagaagctggaaacttttattaacagaatgattgggatgaaggccatcatttgtaacaatataattaaagcttatggcagtttaacctatggcttagaatcatccagaaatagacctaatctcggaatgtattacagatatatttgtgacaggtactttgaatatatggaatttacttatcgtattttaatcaaataagagtatttgaagacaagttatttttagagtatcttattggactatttggtagcattttcgtttctattttcttgatgttctagctacttatttaaataatttccagttagcataacagaattgaaagattgaccttttttctttcatgccttctgttttcatttattggtgttttgaacttcttcctcactgctctacctcattcatttataattcttgactgctttttttttcctttctctggccatgtgagaaccctcttagtgcagtccccttaggtttatcttgcttgcttggaaataggaaagtatttaatggtttcaacataaaatcaaaacacataagtcataaatagaataattatgacttgcataattatgaccagtattgtcaggttttatgtgtctgctggtaaaactttggaatatgatttgcagaaatctcagttcaggagtttagcaaagtttatgaatgtgtacagcattaaaaagtatttaaaccaggccgggcatgaaggcttatgccagtaattccagcacttgggagtctgaggtgggcagatcccttgaggccaggagttccagaccagcctggccaacatgacgaaaccctgtctccactaaaaatacaaaaattaggccggacgcggtggctcacgcctgtaatcccagcactttgggaggccgaggcgggtggatcatgaggtcaggatatcgagaccatcctggctaacaaggtgaaaccccgtctctactaaaaattacaaaaaaattagccgggcgcggtggcgggcgcctgtagtcccagctactcgggaggctgaggcaggagaatggcgtgaacccgggaagcggagcttgcagtgagccgagattgcgccactgcagtccgcagtccggcctgggccgacagagcgagactccgtctcaaaaaaaaaaaaaaaaaaaaaaaaaaatacaaaaattagctgggtgtgatggtgcacatgtttaatggcacaaggattgcttaaacccaggaggtggaggttgcagtgagctgtgattgcgccactgcactctagcctgtgctacagtgagagtctgtctcaaaaagaaaaaaaaatttaaaccagtagtccccaaccttttggcaccaggaaccggttttgtggaagacaagttttccatggaccatgggtgggggatggtttcagaatgattcaaatgcattataattattgtgcactttatttttattattataaaattgtcatatataatgaaataatagggctggccgtagtggctcacccctgtaatcccagcactttgggaagcttaggcgggcagatcacttgaggtgaggagtttgagaccatcctggccaagatggtggccaacatggtgaaaccacatctctacaaaaatacaaaaattacctgggcatagtggcctagctccttgggaggctgaggcaggataattgcttgaacccgggaggcggatgttgcagtgagccgagatcatgccgcttggttggctgggcaaccaagtgagactgtgtctcaaaataataataattttacaactcaacataacgtagaatcagtggtagccctgagcttgttttccatctagggatgatgggagacagtgacaaatcatccaccattagatttttataaggagcgcacaacccagacaacccagatcccttggatgtgcagttcacaatagtgttcatgctcctatgagaatataatgtctcctgatctgacgggaggcagagctcaggccataatgtgagcagtggggagtggctgtaaatacagatgaagcttcccttttctgtaaatacagacgaggcttccctcgctcacagctgcttacctcctgctgtgtggcctggttcctaacatgccatggacccctacaggtctgtgacctgggggttggggacccctgatttaaagcatttctttacagtaaaagtaatatataccaattttttttaaagggtagtgtacaggaagatgtaaaagcacctgtaattctacctgagaactactacttttttctttttttttttttttttgaggcagagtcttgctctgttgcccaggctggagttcagtggcgcgatcttagctcactgcaagctccacctcccaggttcacaccattctcctgcctcagcctgccgagtagttgggactacaggtgcccacaaccatgcccggctaatttttttgtatttctagtagagatggggtttctctgtgttagccaggatggtctcgatctcctgccctcgtgatccgcccgcctcagcctcccagagaactactacttttatactaaataattatagctaacatgtaggtataatttacacatatgatcatactatacattcaatttttttttttttggtccgagacagggtctcactttgtcacccaggctggagtcctgtggcacgatctcagctcactgtagcctgaatctcctgggctcaagtgattctcctacctctgtctcctgagtagccgggactacaggcgtccgtcatcacacctgactgattcttgtatttttttgtaggaacagggtgtctcaagccatccaactgtctaggcctcccaaagtgctgggagtacaggtgtgagccaccacttccagcctgcattcacttttgcaacttgtgttttctactcagtagtataacatgaagacccttcctgtaatgaaatagttaagcttccttgtccatttcctttgccagtggctagaaacttttgactttttccatttaagtgagcttatattatcatttcaaggatcttagcttactctggtaacggagtgtgaggttccagggcttttgttgctgagtgcgagtggaagtgactgagttcacttgctaatttggctttcagattcctcatcatttatttccttgttttcttttctctcacatacccattataaaagtatatatatatatatatatatatatatatatatatatatatatatacacacacacacacacacacacatttttttttttttttttttgagacagtctcactctgtcacccaggctggagtgcagtggcacgatctcggcttactgcaacctgtctcccgggctcaagcaattctcctgcctcgcctcctgagtagctgggattacaggcatgtgccactacgtccagctaatttttgtatttttagtagagacggggtttcaccaagttggccaggctggtctcaaactcctgacctcaggtaatgcgtctgcctcggcctcccaaagtgctgggattacaggcctgagccactgcgcccggccaaggatattttatatttttatctggatttttagatagctgtcttacagtgagagataattcaggttttttggtttaacatattgccaggaaaataaatcctttcttggttattttaataaagaagatacagtactataaacttttttcattcttttgggatgtataaagcaaaatgcaaaacgttctctatactctttcctcaatttgtcagtcccattttttaaggatagttatatttttcagattgttatttatatttccagaaatacttcatatttctgtatgttaatataaattagattaattataaattttcctgattaagatatatgagaaatcacagatattaaaatgagaaagttaaaacaatttccttgataactttatgaaagtgagtgggtgactttctgtgaaaatataaattgcttaaataagggaaaattctagtgctatttgatgtttcagcacatatggaactaataaaagctcaatttttagtagtctagtgtaacattaatatcaaaacttgggaaaatattagaaaagaaagctacaactgcgttgactaaggtgtgaatagggaaatcttaaattcaaaataggtggagttcaaactttattgcatattttagtaggtctcttccaggaacagaaatatctatcagttttaggaatccttgtaagtggatcaaatgaaaacatgatcatttcagtagttactgaaattacatttgataaaattcaacatccatccctcataatagaggttttatttttagaattcttgttagaaaaattgtgagatcattgtttaaaaatctttttcctcaattcgttttctagcattgctattggaaatacttaatagtagatgaaggacacaggattaagaatatgaagtgccgtctaatcagggagttaaaacgattcaatgctgataacaaacttcttttgactggtactcccttgcaaaacaatttatcagaactttggtcattgctaaactttttgttgccagatgtatttgatgacttgaaaaggtgggtaagccagttatttaatgatttaacctcaaaaatctgtgctgttagttaaaattactttcttttcagtgactgaattaaaatgccaaatatttggcaagttctttgtggtgtatattgtatgttctactcctgccacaaattatgtgagagcagattaagaaaagattatttaaaacttacttgcattgattaaaggaagactgctgaatgcaactttaagataatatttttataataaggttcttttatgtgttacctttgtaaaacattttaagatggatttttcttactatatcctcattaaacaaccagggacaatagagttgttaaattatttcctatctcacataaaagaaaacctaggtgtaaagttgttacaagataagactagttagttagcaccagagccaaagttaaaaccaaggtctcccaatgtaaacacagtgttttaattctggaaactgtttgaatcttagcttatataataaaatcagacataaaagtagttttcagaaagtaattagtagcttcagaatggaggaggaggtaatgttgacataatttaaaactgattacaacggaaatataacttgggcaaaaaataatttatacttgttttggcatcagtgaaggaagtaagctaattgggtgtggaaaaataattttaaattttgggaatttatttcaaatctggttaccgaatggtggctcaaggcaggctaccttattgtgactctgggcgcttttattgaaagacaagaattccaggtcctgtgcagacatactgagttacagtgtcaaggtaggagttgagaatctgagttttttgaacatgcttctggtgatccaagtttgggaacttctagtctactgcataaatgttactagcattttccagaattgggtataatgttacctattctatattattaatctgcatgctcatacttaattgctcattgtaatatatatattttcaacattgggaaggaataagcatgtatattattgtcaagttatgtatatgttgaattttaaaatatttattgtagtgggccatacttagactgatggagaaaaatcatatggctttggttttcagagatagttctcacttttgtaatgtaaaattataaatatataccttaatcttatttttgatttttatactactgtacaattgttaatctatttataaatcagaaaagtgttccctttaagctcacagttcttgatggttcaaaaatgcaaccaatttatctttgttgttggaatgtgttctcttccattataaattttaaaaattgcacctaaggatttgatgcaacaataccacgtttcattatcagattattactgtaaatgataaatcatgtatcatgttgacataattgaatttatgtgatggttaacttaaacatttttctcttccagctttgagtcttggtttgacatcactagtctttctgaaactgctgaagatattattgctaaagaaagagaacagaatgtattgcatatgctgcaccaggttttccatgttttcttattctgcttaaccataggctcgatagagtataaaaggaactctggagatcacctgtctaaccctttgtagtagagatttgaaaaatgaagatcctcctacatttaaatgactcctttgtcctttcttctcccagaggtcacatggttttatgacagaactcaagtgcttacctaagttttgtccttttcagatagtatactcattttacccctaatggttactgataagtttgtcaagcacaaaacagaagtatgtggtttttatggaatgcttgccaataatacttttataatttacatccttgcatggctgctgtctaatctatttttattgcttcctgtaattcctaccccatcctacctatctttaatttagagaaacattatctttcaagggtaatctagtcatatgggcctgaaaagcttctcagttgtggtttagcaattttattcaaagtctttatcgttttttctgatattaaagtttatacatgttcatgagaaaaacgtgaagcaggagagaagtgaaaagtaaaaatatcacttcctcttaaaattgtatttcctagcagtgcatgtggaatgattatgttgtgttatatgacaatccaaactcttttctgtctttgtgtaaacacgtgtgttttatctatattttatgaagaaaaggactttaaaaataaaattgttccttaagatagtcttttaaacagttatcagaaaattattttccttttactacatgtagatttaaatcagtttttaatagctgcttattatcccattgtcttgttctactataattaataatatctatctcttcctcttttcaaaattttcaacaatataaacaaggttgtagtatctgtatttaaaactacacctttgcccatttctggctatttccttaggaaagaattcctagaatgtatgtgtcagagtttacagatgagggcttctttgaaggcaaattgccctccagaaaagatttatatgatatacgtccatatgaaaatacttatttactcaagcttcataccaattttgaggttagaagtccttttcagtgttgcagagattaaaaaggatgattattgctgaattgagatgtttattgactattggtagttccttgtggccatattccaacatgtgttggaatatttatttattaatggtttataataactatatgttaaaaataagttaatgttgcaaataatttctttcccctcactttttgggataaactttgtttatggtatctttgtgtgtgttcatgtgcacaagcgtgtgtgtttatatttaaaattttctttttttcccactgtgactctgggcaatgacagaaatttcaatgcaccaatagttatagaagcttttaaatgtcccagtctgaattattggagtaaatgacttatttaggaagagatgtgtttggatatcacatcctcatcagtagtgtatacatccatatagtgtagcaaaggattaagtttctgttcttaggaaatttaattagagtcaagacaatgaatatttatagaatttgtcacttacacgttacctcacagtgtatacaggtagatagatattccttagaaatgatcatctgccttttgattgaacatttgtagtaattgtcatagttgataattccataagagggctcactggaattgttttactatagataacttcagatttccattaatattaagatatgataatgaacttttattatatccaaattcaacagttttatcaaaaataggggcagttttgaatgttctagcaataagaatattctctgtaatactgtgcttaaatttgagtttatattacttttacgctttgtcctaattatgttttaatgcattactacaggaaaaagttttcattcaaaatgaattcagattaggtggagatagttttaaatcgctagtatattttcttaactattttctatatgaaagaattcctttcctttttttatgcaatgtttacataaaccttgcatagtaaaaaaaattttttttactttccgtttaaagttctctaagcttgctacttttctatttccaccccatattgaaggccaaaagcagtataacctttacaaattaattatttaaaattttttattttaaaattatgcgtacacggtaagatatttttaaatgttataaacatttagaaattaaaaagtaagaagtaaaaatttctgttttccttctgcacttcctttcttatctccaaagtataactaatagtttttttgttttgttttttttttttgtttgtttttgtttttttttttgtttttttggttttttttttttgagacagagtctcactctgttgcccaggcctggagtgcagtgagcgtctgcctcccaggttcaagcgattttcctgccttagcctcctgagcagctgggattacaggcgtgtgccaccacacctggctaatttttttgtatttttagtggagacgaggtttcaccatgttggccaggctggtcttaaactcctgacctcaagtgatctgcccgccttggcctcccaaagtgctgggattacaggtgtgagccactgcacctggccaacagatttttttttttttttttagagacaatgtcctactatgacatccaggcaggagagtagtggtgccatcgttggttattgggttgttatctgcagcctccaactcatactcctgggttcaagtgatcctcctgcctcagccttctgagttgctggaaccaaaggtgcatgccaccaggtccagctaatttttggtagatgggtcttgtataagtcttgtttttgtctgctttgaaagcttgtatactaggaaaaacatatataaataccttttttatacatgtgtttcagcggtatagtgtgcctcttcttccacatatttgccatttcagttaacatcaaactatagcatttgtcagtgcatgtggtagaaaaatatctggttatttcatgttttccttacagacatggacatgttttttttaattttatttatttatttttatttttttgagacagaatcttgctctattgcccaggctggagtgccgtggtgcaatctcggctcactgcaagctgcacctcccgggttcacgctattctcctgcctcagcctcccgagtagctgggactacaggcgcctgccactacgcctggctaattttttctattttttagtagagacggagtttcactgtgttagccgggatggtctcgatctcctgacctcgtgatccgcctgccttggcctcccaaagtgctgggattacaggcgtgagccaccgcgcccggccggacatgttttaacatgtttatgaaacatttacatatttttcctgattgcctgtcggcatatttgtttttgggttggtagataccaacactggtaatgtgtttactatctttggtaatagtctgtctatgattagctctatacctgttgggtatttaagtccagagtcctgaaaatgagctttattatatatgattactatatgtaaaccattgtcagtatttaatggcaggggtataaagagtatacaattatttgtttattattattagtagtagtagtagtattttttttgagtcaacgtctctgtcgcccaggctagggtgcagtggcaagatcttggctcactgcaacctctgtctcccaagttcaagccattctcctgcctcagccttccgagtagctgggattctgtaatcccgccaccacgcctgactaaatttttttgtttttttagtagagacgggatttcaccatgttggccaggctagtctcaaacttctgacctcaggtgatctgctcgcctcggcttcccaaactgctgggattacaggtgtgagctactgcgtccgacctagagtatacaatgattttaatctagtatttgtgctcttttagtgacccgaatattttaatgcataattattgtctgttgcttctgtgttctctttataaatgtgataatcatttgtaaccaccccagctaatgaaagagaataattttaagcctgaaactttagaacttatagaaggaaacttgtatgtctgcatccctaggtcagctggctttttactgagtcttaaaacctcattctattaaaaaatttttaatttttaaaaaaacttttagttttttgggtacatagtagatgtatatatttatgaggtatatgttttgatattgatacagaaatgcaatgcataataatcatatcatggagaatggggtatccatcccttcaagcatttgttaccctttgtgttacaaatgatccagttatacacttttgtgtgtgtgtgtgtgtggagacagagtcttgctctgtcacccaggctggagtgcagtggcacaatcctggttcactgcaacctctgccttccaggttcaaacaattctcctgcctcagcctcttgagtagctgggattacaggtacccgccagcacacccagctaatttttgtatttttagtggagatggggtttcaccatgttcaccaggctggtctcaaactcttgacccaggtgattcacccgtcttggcctcccaaagtgctgtgattacaagtgtgagccaccgcacctggcctctagttatactcttctttatattttaaaatgtaaaagttaaattattattgactgtagtcaccctgttgtgctaccaaatattaggtcttattatttctactttttgtactcattatttcaaatatttttaatttttattcatttttattatttccccttttgtatggtgctgataacatctcattctaaaagttgtgggctataactgaaacttcaaccctaagaaatacaaatgctacctttatatttttacttttaaaattatttgagatagattcttacagtttttaaaagaaaataaattctgaaatgctgcggacaactgtgagtttatcatttggtctggtctgggaaaatctcaagatattttcaccttttgagatttggcattatttatataggaagtcaaaagataaggtaaaggagtatatggggacagtattccttgaaaaacaagaatgtttaatactcatatttttctgttcatgttttaattttagattttaacacctttcttattgagaagactgaagtctgatgttgctcttgaagttcctcctaaacgagaagtagtcgtttatgctccactttcaaagaagcaggagatcttttatacagccattgtgaaccgtacaattgcaaacatgtttggatccagtgaggtatagtggttttgaaatgtactgtaaatgaaacttgacatataaaatttctcttttttccctttttttttgagagaaggtgtcgctctgtcacccaggctgtggtgcagtggcacaatcactgctcactgcagcctttacctgcctggctaaattttttgtatttttttgtagagactggcatttcgccatgtttcccaggttggtctcagactcctgggcttaagcagtccacccaccttggcctcccaaagtgctgggattccaggttttagcaattgtgcctggcctaaattccagttttaaggtccccttgttcatttttaggacttgggtgaatttctaactggggtataaggcataaggcttagtggcaaaagttgtttcctagtatctggagtcctgctaaaatgttaagtgataatctttgtattaattgctttacagtcatctggaatacttactaaaaatttaggccaggcacggtggctcatgcctgttatcccagcactttgagaggccgaggcgggtggatcacctgaggtcgggaatttgagaccagtctgaccaacatggagaaaaccctgtctctactaaaaacacaaaattagctaggcgtggtggcgcatgcctgtaatcctagctactcaggaaggctgaggcaggagaatcacttgaacccgggagacggaggttgtggtgagccaagattgtgcctttgcactccagcctgggcagcaagagcgaaactccgtctcaaaaaaaataaataaaaaaaaaatgtatatttccgtacagattaactctaatcatgctttctggagatgaacttggaaatgcatttttaacaagcacacaggtaggtatttgagaatccctgtactaaggacttggcaactagactaatctccagatatacagattgagcatccaaaatctgagttgctccaaaatttgaaactttgagtgctgatatgaaactgaaaggaaatgcttattggagcatttgtattttcccgttagggatgttctacctgtacagtttccttacagaaggttattgataaccaaaaagattaataatcaatttgatgatgattattcatcacccaccatattataggagatagaggtgggatgttattatcatgtaactgaaggagacccttaagttttgtttaactttccaggttttttattgtacactataaacctacgtattttcttttcaaaatatttattgtgatgcatttttaaacaataggaccaccagactcttctccccccgacttttttttttttttttttttttttgagacagagtctcgctgtgttgcccaggctggagtgtagtggcatgatcttggcttactgcaagctccgcctcccgggttcatgccattctcctgcctcagcctcccgagtagctgggactacagtcgcccgccaccacgcttggctaattttttctatttttgagtagagacggggtttcaccatggtagccaggatggtctcgatcttctgaccttgtgatctgcccgcctcggcctccgaaagtgctgggtttacaggcgtgagccaccgtacccggcctcttctccctttttaataattaattataattaaaggaagggtctagccgtttacaaatttacattatttgtctgttaatgagcaatttcataatgagcagtttcatgcagtgttacaccagtctgaagaaatatcctctgtactgcaaatttccggagccatatttcaactttaaggtattaaatccttttgtgtaagttcaaagtagttttatacacccttcatttttacctattgagatatgaaggcccttcctcttactttcagatattgttgtccatgttaaaattaaactaatttcccacaacatttgtatttgtctatagattgtcattttgtacataaaatatgccttattttgtttacatttagaacctaaggacatagctttataaactgaatttcttttaattcgttcccttttagaaagaaacaattgagttaagtcctactggtcgaccaaaacgacgaactagaaaatcaataaattacagcaaaatagatgatttccctaatgaattggaaaaactgatcagtcaaatacagccagaggtggaccgagaaaggtttgaattcaaaagtgaatttaagtattctttaaactgtgaccattttttgcatttcccatatatgcattatttgttttggtagagctgttgtggaagtgaatatccctgtagaatctgaagttaatctgaagctgcagaatataatgatgctacttcgtaaatgttgtaatcatccatatttgattgaatatcctatagaccctgttacacaagaatttaaggtgaatactgtttaattctaatttactgttttgatttccattacttttatattggtggaaagtgttactttttttgattataattattaaaaataagtatggtgctatttgtcatgaagattgtaatccttcagtaagctgagacagtcttctttccgaaatttcagagaaccttatcagggttagaaaaatggtcactttctatgagcaactagttttttaaatttttttattttttatagagacagggtcttgctatgtttctcaggctggtctcaaacttcctggtttctcaggcaatcctgcctcagcttcccagagtgctaggattacaggcaagagccaccacgcttggcctctatgcaacttatatttttatttacatattttatgtgaacaactaagaattctaaatttagtaattgatttgtactctgcatgtttacttgttatattttagagagagtggtcatcttttcactatttcttttatcattaatatttggcttatcaaaatcagcctggttgctcattgcttaaagatcaacaggtagccatagaataaaaccagttttgatttggaggttttcaaattaagtaaatgaagttgctttcttgggtagttgatagaatgatagcataatatcaatagaaataaattcttagtaaccctcaatcacagttgtttcaaggtagtttacaataggcttttccactcctggcaatattgacattttgggccagataattctttcttaggaggtaatgttctgtgcacttaggacatttagcagcatccctgtcttctacccattagatgccactagtattcacttccctcagttatgacaactaaaaagtttgctgccgctgccaaatataccctggggataggtggagggcaaaattgtccccatttgagaggcactgctttacatctttattagagtaagaaggaagacaaaactttcccactcaaatgaaagtagctctctcatgagggaatttcaccagaaggtgaaaaagtctttgtccacaatatttagattacttatcagctcctgtattttctcttaatttctggtaagaattctagcagtagtttacatatacatttagttggaaataactcacttataaagaataagcctgagtatgtacccattaagtttgacataattgttttctttcacaatgactttgagagaggagtgttgaggttagatcaaagttatatttgtactttgtttttgtgaaattgctggttttacattctagagtatgtctttgagtaataactatcttctgattttacaaagattgaataacaggtcagtttttaagttttttaagtgacttggctttgaaaattgaactttccaaatggcttttgttttaacaaagcaaataacagttttctctctattttttcttcctttgcccctccttaagatcgatgaagaattggtaacaaattctgggaagttcttgattttggatcgaatgctgccagaactaaaaaaaagaggtcacaaggtggtacttttgattggaattttggattgttcaattatttttttatcaatcattagaaatattaagatatgtttaatttcaggtgctgcttttttcacaaatgacaagcatgttggacattttgatggattactgccatctcagagatttcaacttcagcaggcttgatgggtccatgtcttactcagagagagaaaaaaacgtaagactacttatgtcatacataccaaactattcttttataattcctatcttgatttctgaagtaatattccaaatagacccacaaattgataaaaagatagaaatgaccagaaaccctgtggttttatcaaaaacaaacattttgatttagtactaagaagtcttaatttttgattcacaaatatatatatcttctggcacaatcttattaataatatcctacttaaccatcactgtaagaatattgggatagcaggaaattttttgcctttttgccctgtcctcaactttctattatgaaaatatcaactatatggcaaagttgaaaaaaaaaaagcaactgtaaatccgcctacaatctgctgttaacatttgactatacctttttaaaaacacatttcctgtaatagcagccttgctgtatccattcagcatttaatcctggttttttggtgcatttaaaaataaaatatagatgatactacccttttccgtaatgacttcagcatattttatcttttggggtaaaatttacacatactgaagcaaataatgtatacatttgctgaatctttctgacaaatgcatatgtaaatttatacctaacccctattaagatatagaatgttaccatcagcccagaaagtttcctgtgcccccttctagtcaattctcccctgcacccaccccatgtgtttagacaactacaattttttcatcattttttgatattagcttttcttatttaaacattgttgtgatacatggtttttaacaaaattaagatctctttaatataggtgcttggacgataaagctaacagcacaggttttgttaacataattgttttatagatctgaatgatttgtttggcctcctttgtttaagtctttaatagttgtaattgaaaacatttttctccttcagtcttgttggttaatttattttaatctgttgtatttacatcctttttgcttttagatgcacagcttcaacacggatccagaggtgtttatcttcttagtgagtacacgagctggtggcctgggcattaatctgactgcagcagatacagttatcatttatgatagtgattgggtaagttggaagtatagcaaggaatatgctgattatatttccattttgaatttttttttttttttgaaatggagtctcactctgttgcccaggctggagtgcagtggcacgatctcggctcactgcaaccttcacctcctgggttcaagtgattctcttgcctcagccccctgagtagctgtgactataggtgtacaccacaatgcctggctaatttttgtgtttttagtagagacggggttttgccatgttggccaggctctcttgaatcctgacctcaggtgatccgcccacctcggcctcccaaagtgctggcattacaggcttgagccaccacacccagcctccattctgaatttttttttttttttttttttgagaaggagttttgctcttgttgcccaggctgggattaagtgctgggattaccagcatgagccaccgcgcccggccattctgaatttttaatttttaatggtacatgttacaaatttacttatctattttgaaaagatacccattttcagctaagagttatttcttcataaagttttttgcaagtaaaaattgaaaatttttttttacttttgtttttagtgacagggtctcactatcacccaggcttgagtgcagtggcaccatcacggctcagtagccttgaccttttggattcaagtgatcctcccacctcattctctcaagtagctgggtctatgggtgtgctaccatgcccacaaaaaatgtaaaaattagtgagaccacgtctcactgtttgcccacgctggtcttgtatcctcatatgatcctcctgccttggcttcccaaaatgctgagattataggagtgagtcatcgtgcccatcctgaaatgttttctttagggtatttaaacttttttgttaatattgtcaaggatctgtggaatgataattttgtctatgaagccactctggaagtttaaattaagacaccactatttaaaagttcctggctagatcattcatgttgactttatccacatgagtttatgttaattttaacctaataccgttaaatattatttttctttttaactttaagaacccccagtcggatcttcaggcccaggatagatgtcatagaattggtcagacaaagccagttgttgtttatcgccttgttacagcaaatactatcgatcagaaaattgtggaaagagcagctgctaaaaggaaactggaaaagttgatcatccataaaagtaaataacacttatgtagtgctttattgtttaaattgtgcattgtgtgttgtggattttgtttttattttgtttataaaatattacagcctgggccgagttctgtgtctcacacctgtaatcctagtactttgggatgccaaggtgagtggatcacgaggtcaggagttcgagaccaggctggccaagatggtgaaaccgcgtctctactaacaatacaaaaattagctgggctcggtggcgggcgcctgtaatcccagctactcaggaagctgaggcaggagaatcgcttgaacccgggaggaggaggttgcagtgagccgagatcgtgccactgcactctagcctgggtaacagaacaagactctgtctcaaaaaaaaaaatattaacagcctgatatgacaggatttaaataagcagtggggaatttgggagcctaaactaagttggtcaccatagacataaaagaaagaatgttagcgagtatgtagatatgtagatgaagagcagatgggcagagaaaaggggtcaaggataactacatgttcctgataagagattggcttgctaaaagttttaagataaatattttgcaagttccatgtattaaaatattaagtgtatttaagtgttataaaaaatctatttatttattgaacccactgtttcacagaatatttcactgcagaatgccctttttatagttttggacacttttttttcctttttcatttccttatcataaccagatgggtctcaacaatgctttttaatctagaaaaaattctgaggaggtggggaactgacataggtgaaaaagttttgttcctgagattccttagagaagttatacttctatccattcaccataaaattttctttgaataaatggcttgatagctacctgaagaaatgttgaaaatcatttatgtaaatcatcaagccctagagaaatgggaacatgataatgttaatgtgaaaagtaatgttggaaatcactaataatttattttatactccttttccacttgtaaatactttctctgggttttgaggtaagagtgtattaaggtttagacaaaattaatttggtgaaacatttagattgtaattggaacttgcattggggaaaaagcataatttttttttaagagaccatttaacttttttacccaggttgttctcgaacacctggactcaagtgatcctcctgccttagcctcttcaagtgttgggcttataggtgtgagccactgtgctcagccctattttcgattttttagtagattaattttgtagaaaattttgaagggatttttttaaatgctgacatttttcagttgagttattacatacatacagcaaaatgcacagatcttaaatgtacaggttaatgaagtttgaccagatttatgtactcctatgtaactatcatcgagatcaaggtagcattttcatcatccaagaaattttctttgttcaccctttccagtaattcctatgctccccttaccatcactaggaagcatccagtattctgatttttgtcacactgatgagtcttttttctgtttagctattttgttgaatatattttttcaacacagagtcatctgtgttgtttttagtagaatttttttcttttaattggtgaatagtttgttttttccattctcctgttggtcgacatttaaattatttctagattctggttattatgaataagttggtcctgtacaagtctttgtggacataatgcattttttggtccttgatcttagggagggtgcgtgtttaactactggaaactaccagccttttccaaagtggacatatcattttccagtcctaccagcgaagcctgagagcttcatttgcttttattttttatcaacacttttttttgccgtccttcttaatgcaagccattgtgattggtttgtaatatgttgtattgtagttttaaaaggaattttaatgtttttaatttctcattttttttagatcatttcaaaggtggtcagtctggattaaatctgtctaagaatttcttagatcctaaggaattaatggaattattaaaatctagagattatgaaaggtgagtttttaattttagaaagatttaatttgtagctttgaattattcacatagacttgaatattttgttttctatagggaaataaaaggatcaagagagaaggtcattagtgataaagatctagagttgttgttagatcgaagtgatcttattggtaagtattatgcttttttttaatggaagcttcgaaacatacacttaattagcataatgtaatgaaccccttgtgcaattcattcagccacatgtatccaatcttgttttattgtcatttttcttcttagagtattaaaatcaaatctcagacatgacattttgcccataaatgtcattatctttaacttcttccataattcagatattttctgtaaactggtaaataacacttgtaaatgaatatattcaagttcctgtcttagttaagaataccagtgctttgttctcatatttttcgtcataccaggaggcacatcgtatctggatttcttatttccagtgagctaagattaatcaagataatgttataaagtgtcttgtcagccttcatcctttacttaacacgatgatttattttattttattttatttttttggagacagagtcttgccctgtcgcccaggctggagtgcgctgacacgatctcagctcactgcaacctcagcctcctgggttcaagggattctcctgcctcagcctccctagtagctagtattacagtcgcctgccaccacacctggctaatttttgtatctttagtagagacagggtttcgccatgttggccaggctggtcttgaactcctgatttcaggtgttgtgcccaccccagcctcccaaagcactgggattacaggcatgagccactgcaccaagcctaacgtggtgatttttagtatcccttgaaagtggctgataagaaccattattaacttaatcattgcaaaatggtgatttttcttgttctgtcattcttttattagctgggttatttaagaactttcccttacagtttccctgagatagaagagagccaggatatattgcttcttttttttttttttatcagtttttagaataccaccttatgatctgatgcctacagtgatgaccatgaattattttgaaaacaaaaataatattttgtacttcataatttcctaattattttacaacatattactgtcgtctaggctattgattatttgtctgttgcatctgtatggtggagatactgtataatctttttttcccaactgtattccgtgacattttggtcttttgaaattggtgatggcagtaacattcatatcacggatacaggcagaaactagaaaccccagtctttgtttttaacaaaaaagggtcttgctttgtattcctggctagaatgcaggagtgcgactatagctcattgcagcctaaaagtcctgggctcaagggatcctccagcctcagcctttggagtaagctgggattataggcatgagccattgtgcctcagtttttgttttttttgagacccaattgttaaacatttacctgcgtggcactggctacagtgtcatgatatcttattttcaaatatgttgttcattttaaaattcaattctgtgtcttattgaatcaaaataaaatatattggttggaagtttttttttttttttttttaatcagatgtattttccaaacattttcttctactctggcctgtctcttcacttacttacttagtatcttctgaagagcaaaagttttaaattttaatgaatttcaattttaacaaatttttttctgttcactcatgatttttatgtcatctgtaactactctttgcctaattcaaggtgttgatattttcttttaatagttttatagtttttgctcttacatttagatctatgatctattttcaatgaattttcatctttttgcatgtcaatattaatttgttaaaaagatgatcctttttctattggatggccttgtcatccttgatgcaaataatttgatcataaatataaggatttatttctgtattctcaattctgtcccattgatctctgtggtattcctatgccagtatcgcactgatttaattaaggtagctttatgggaagtgtactttctctagttttgttctttttcaaaattgttttagatattctggattatttgcatgtttatttgagttttaactttgaaatagtttagggagaaatatgagacatacagcatcatggtcaaatctaaactatattaaaaaacaacattatgtgaggcatgtaaggactgtttaacatctgataatataattcatatcaattaaataatggagaactagatgatcacctaattagataccaaaaaccaacttgccataatatcgtaatcatcttcataatttttttttatttgagacaaagtctcgttctgtcaccgaggctggagttcagtggtgtgatcatggctcactgcagctttaacctgctgggctcaatcaatccccacacctcagcctcccaagttgctgggactgcaggtgtgattactatgtcctgctaattttgttttgtgtattttgtagagacaggggtttgccatgttgctcaagctggtctcacactcctgggctcaagtgatctgtctgcctcatcctcctaaagtgctggcattatcgaaactgcttttatttgcaagtggtctggtttgattatcttcataggaagtccaagggaatccagaatcttttaaaatagaatttaagaagattgcttattaataatatgtgtaacagcaataattgtttaataatgaaggtttttacaacagctacaaaattaacatgcctacaattaaagtttaacaatttttaacatgtttatataaggacagaattatgaaacattgaaggacgttaatagaaagactgagtaaacatgcagatttagctgtatttgtggatatgaatggttactacaaagtgtaagtcagtggtccccaaaactaacttatattcttgaatttttcttctaattaaaatcccagaatgatggctgggtgtggtggctcatgcctataatcctatcactttgggaggctgaggcaggtggattgcctgagctcaggagttagagaccagcctgggcaacacggtgaaaccctgtctctactaaaatagaaaaaattagcggggcatggaggcatgtgcctataatcccagctactcagaaggctgaggcaggagaattgctagaacctggcaggtggaggttgcagtgaatggagattgtgccactgcactccagcctgggtgacagagcgagactctgtctcttaaaaaaaaaaaaaaaaatcccagaatgactttttgtaaaacagactgttgttaaaatttatatgagagagtaataaagggccagaaccaagacagttttgaagcacaagatattctataccaggtataaagtcttattaaaaatttaaaagtcataataatcaagatggtagaattagcacatggtgtgatatattggctagaagtacaatatggtgaatctagaaagacaactttcacgaaaagctaataaatgtgaaatggaacttcaaacaactgataggaaattcctattaatcaatagatgatctggggaaatagtaattaataggggaaaaattaacttagattctcctctcctcacactgcacttacaaacttcagataaattaacaatccacgtgttcaaaacctaaatattaaaggtagaattttaacctaaaaagacaagaaaatatatttatgattttagaattagaattctttataatacagaaatcacaaattatatgataggtttcatagattttaattacattaataggaaagactactataagacagatgacaccataaagagataagagacaaaccacaaataatatttgcaacatataacaggaagtgtttaggatatgcaagtaaataaaagttgataatgaaaacggataatataagagcaggctattaccaagagagaaagaaatgtctgatgaacagacaaggatgattagaaatcagtaatacaaatgaaaatcagatttcatttcacagctgtcatgttgataaaaatttaggagactacatattgtcattgattcaaaatgtttctcaaggtaagctttttgtggtgtgttttcagctattaaacgaatcgtgattgggcctctttttaaaacgtttctgacaacatgattcaaattgatattatttattgctctttgacttgtttatcttaccttaaattcagcaaaagcgattttgactagcaaactgatgctttagattgtatgctcccaagagtctgattctagttgttgtattaagaatagtgtacctttttgctttcactgctattaaatcttggtgattaaggaagagagtgccctgtattactgtgagttttataattttggacagatgactcacttctcataacatcatattggatgtttcttttacgatttcttcttcttatacttctaaaatgtacctgttttaatgtttttcccttagatcaaatgaatgcttcaggaccaattaaagagaagatggggatattcaagatattagaaaattctgaagattccagtcctgaatgtttgttttaaagtggagctcaagaatagcttttaaaagttcttatttacatctagtgatttccctgtattgggtttgaaatactgattgtccacttcaccttttttattatatcagttgacatgtaactagtaccatgcgtacttaaatagatggtaattttctgagccttaccaagaacaaagaagtatccatattaagtttagattttcagttaatttttgagactgagtagtattcttggatacaggctgatgtgtacttaaccacttccagatttatacagtcttcctgtggaagtttagtaaatgtctttttccctcctttcttctagtaatgcagttcatgggctttaggtacttcagttatgaagtaggcttttcatggggagagattgggattatgctctctgttgtttaagaaactgtttgattttagagtctatttctatgagatagtttaccaaataaatgttccttataagatgatctcattaaattatttcttcaggaatagcttaggtgcaataatagcaaaagacttggctgtcggtaggatttggttattttgttttcttggtttcattcactagtactataggagtgtgtcatatagagatttcaagtggacattgtgttagcacaagagaagtttctgaatgaaactttagggtcttgagaaacgactagaaattggaaatggtagtgtatcatgcaaaacaagacagaccctgaaaatttatagtagtgggttaactagaaccaaatataagagaataggccttaggaatatgtaagtaatgcacaatctgtaatagaacagcataaaggccaaaagaggcacaatttagaccctgtgtgaaaggatatcagacaatgaggaagagaaatcctgaatgtaccctggagaggggacatactccataagccatacatttctgtgttagtgtttatttcatggaaaaatattgctgttgccatgtatattcaaatgcagatcagatgatctgttaaggataatggaaccgtcacttaagaaaaacttaattttttttccctgtgtcctattggcacaggtcttttcttttaaatttttattttaatcgttttgaggtacaggtgggttttggttacatggataagttctttggtggtgaagaaaaacttcagatagaacatttggttaaataaaagactatagagcaggtttatttgttttttaagtcaaaatgttaacccattacataagcatgctgacctaggcttgcttgaaactcgtgatcttgtccttagtgacccagtctttcctgttacattgtcctaaatgactggtttcatagttttactctgtcattgcacgtctcatatctcctccctctcactttgctccctattgccctgagaaaatagacgcagtcagaaaagaatctttaaaagttgtcaccgttgcatctgtaaacctagcatctgtgcccatctgtccccatctgccctttattatatactgcggatatattgtttgtcgtagcttgagccaattgcaatgtctcatttcttttataacaaagctccttgaaaaagagttctattatagcaaaactccttgcctgtattcattgtttttagtttgttctgttttttctgaacccattccaatcagatattcatttccattggagctggtatttttaaggtctcgtgacgtcagtgacctcattttacttgatctattagcagcatttcatacagttgttgactcttctccattaaaacatttactttatttggcttctaggaaacatattttcctgctttttcttcctatttctctgactcttttctcagtttcctttgctgtttccttttctatcctctaaacattgaaatatcctaagcctagtttgggattcccttgatggtcttcatttctttaatgggaactgtgctggtgactcaaatttatatctccagccagaacctttctcctgaattccagattcacatatccgactgtttactaggtgcttgataactatatctgtacttttcatcttgtttaatccaaatttacttcttttgcattttccttagttcaataaatgacaactttattcttccagttatttaaaccaaaaatcttagagtcattcttctcttccttccctcatatttcatgtctgattctaaaggaaatcttgttgcctgtactttttctttctttcctttttttcccctttttttgagtctcgcactgtcgcccaggctggagtgcagtagtgcaatctcagctgactgcaatctctgtgtcccgggttcaagcgattctcctacctcagcctcctgagcagctggggttacaggtgcatgccaccatgcctggctaatttttatatttttagtagagactgggtttcaccatgttggtaaggctggtctccaactcctgaccttgtgatctgcccgccttggcctcccaaagtgctgggattgcaggcgtgagccaccacatctggctttttttttttttttttttataaacagtttcacttcgtcacctgggctgaagtacagtggtgtgatcttggctcactgcaacatctgccccccgggtttaagtgattctcattccttggcctcccgagtagctgggactagaagtgtgcgccaccacacctggctaattttcttatttttagtagaaacgtggtttcaccatgttggccaggctggtctcgaactcctcacctcaactgatcatctgcctcggactaagtgctgggattacaggcctgagccaatgcgcccagcctactttctataaaagtcgtcatgtctctgcccccaccccccgccaccccccacatagtctgtttcatttgattttccccttagtttagtgttttattttgatgtttcttcagatgccttgggatcatttactgttcctcatatttaagagcaaatgcttaaaaattcttagaaataccttcttgaaaagcctgcattcctaccacctctcaccacttcaacatgaaataatgatcccttacatctttttagtgtagttatataacttttgattggctcaataattacttttattatggctgtgtaagtattattaaagctttagataagccatggaatatgctgtgattttattttcattcttgtgcagctttttttttctccctgaagttaatacttaactgttttttacctaccagtaatttatatctaatcactctggaaatataagcccctcagtatattaaaacagatctcatgattcagtaataaacctccccctccaaatatatcccatcacctctactccctggaacattcttctagtttggactgtagaactgattccatctggaaccttcctttaccatactcctgggtattcctgttggctgtttcatgttttggaattactgtttactgtgtcttgtgtctccccccccccccctttttttttcctttaagacagagtttcactcttgttgcccaggctggagtgcaatggcttgatctcggctcactgcaacctctgtctcccaggtttaaactattctcctgcctcagcctcctgagtagctagaattacaagcgcccaccaccatgcccagctaatttttgtatttttagtagggacagggtttcaccatgttggccacgctggtctcgaactcctgacctcaggtgatccaccctcctcggcctcccaaagtgttggtactacaggtgtgagccactgcgcctggctggatctaactttttttcctccttggtttactcgctcactttgatggattatgttgtcttgtgttttcccaagaaaagaattcaagggaaatgaattttttgagaactcgcatatctggctgtatttttgttggattcttatatttgatggatagttctggtttgggattttagagtaggaattattatcttctcagaatttcgaaagttgttgtgttgtctcagaacttccagtgttgtgggagagaaaattaatggttccttttttttttttttttttttgagacagggtctcattctgtcacctaggcatgaatacagctcactgcagccttgacctcccgggctcaagtgatcctcctgcctcagccaccaatttagtttggaccacagccatgcaccaaatgccctgctaaatttttaattttttgtggagacagggtctcaccatgttgcccaggctggtcctgaactcctgggctccagcaattccccccggcttggcctcccaaagggctgggattacaggtgtgagctcctgcacctggcccgaatgctgctttgatttccagtctgttgaaggtggggggaaccagccttttgttaatgtgagcttccagtgtttctttgtcttttgtattctaaattaataacacagtgatgtgtcttggtatgggtcttttttttttttctttttttttttcatttttaaagagactcctgctatgttgcacagacttgtgaattcctggtttcaagttatctttccccctatgtcactcaagtaatgtggactacactcatgtgacaccatgcccatctttatgttgtgtatcttatttttgttttgttttactcttgaatcagctcagtctgaaaatctgtcttttaattcatggggattttttagaatgatttcttggagggttttgtcttttgaatgtgtggtcccttctctgcctagaatttttttgtttgaatgagacatggtcttgctgttgtccaggttggagagcagtggtgcaactatagctcactacattcttgaatttctgggctcaagccatcttcccatctcagctttcagaatatcttggctacaggcatgtgacactatgcccagataatttaaaaaaaaaaaaaaaatttcttgagacagggtcttgctatgttgcccaggctcgtcttgaattcctgttctcagagggtcctcctatgtttgcttcccaaagcattggtattatatgtatgagccaccaccactagcacttctgcctagaactcgtaacaaaatttctttcccccatctgcatagtcttgtttcattaaatgattcttccctttttaaagtttagtctgtcttttattttgatgcttcttcaaatgccttgggatcatttactgttcctcaaatttaagagctagaagaaatctctctaagc

SEQ ID NO: 12712 - DNA, 8056 bp, Homo sapiens; identical to SEQ ID NO: 11575

SEQ ID NO: 12713 - DNA, 2295 bp, Homo sapiens; identical to SEQ ID NO: 11572

SEQ ID NO: 12714 - DNA, 286 bp, Homo sapiens; identical to SEQ ID NO: 9955

SEQ ID NO: 12715 - DNA, 5888 bp, Homo sapiens
gcatgtcagggatgatccgtctctacgctgctatcatccagctccggtggccatatggaaaccgacaggaggtaggtaaaagaggcttactgtcaataatgagaggttagaccacagtccatgtgtattcctcccacaggaaatgttggccttctttcagagagccagtctagttaaaggataaactatatggcagtttcatgggtattatgtagaggactgaatgttgattattagggaactttcttggatcacctggtactttaaagagctggttttgtaacagagtctaccagaggagagtctgttataaatcagtcattaaggttagaagattttcttacaagaggaatgagcaagaaattgtcatcttagaactagttgagaccttagaagccatctagatcacataccttacttcacagatggacagaacaagctcagaaagctgcagctggggttcagggctttgacttgccagcccaattaatttctcagggaatacagattagaaggacagagaaattaatagttacggagacctaaagagaaaaaatagaagttgattaaatccaagtttttattgtatgcctgctgtgtcccaggttctgtgctaaaggtaccaagaataataaataaaatgtcaataaggctaattgttaccctatggaatgcctgaaactgaagctgacacatgcatattgaagggagcctataaagaatgtgtgggaaccaatgtattgaaacattaaaaaatagaaggcgaggtagcttcaggcctgatatcccagcactttgggaggctgaggtgggtggatcacctaaggtcaggagttcaagaccagcctggccaacatggtgaaaccccgtctctactaaaaatacaaaaattagctgggcatggtggtgggcacctgtaattccagctacttgggaggctgaggcacgagaatcgctttaacccaggaggcagaggtggcaatgagccgagatcacgccattgcactccagcctgggcaacaagagcaaaactctccctcaaaaaaaaaaaaaaaaaaaaaaaaagaatgtgtgggaaccaatgtactgaaacatttaaatacagaaggctgggcgaggtagattcatgcctgtaatcccagccctttaggaagccgagacaggtgggtcatttgactccaggagtttgagaccagcctgggcaacaaggtgaaaccatgtctctaaataaaatacaaaaaaattagctgagcacggtggcatgtgcatgcctgtagtcccagctacttgggagactgaagtggaagaatcacttgagcccaggaggtgaaggctgcagtgatccatgatcgcactatagcactccaacctggacaacaaagtgagaccctgtctcaaaaaaataaaagaaaaacagaatttgtttagtttgtgttatttctgccctgtggcaggtgctagggctggatgatctggggttcatttccacttggtaatggctggatgatacactgggagtttagatttctaaacaaaatgagatcaatgataaccaagcttctctactcccagattcaccctcatggcttaaatcatggatggcgctggttggcacagatcttaaacatggagcccttgtcagatgtgacagccaccctcctctttgacttcctggaggtacgtaactcagttatcacacaagagaaggccagtggttgaggtagccttgatccactgggtgacatgaatggggaaacagcatagcatttgggcctgatagtaaaacagcatgaggttccagtgtcatacatttttcccaagctgtagaccaaccttgctttcacttttactccatactatatttacttggcttctctggatttttttcattataaagaacagaaaattgtacattctagcaaaagtgaaaagaggaatttgttttagggatatagaagggactcccaggccgggtgcggtggatcacacctgtaatcccagcactttgggaggccaaggtgggcggatgacatggggtcaggagttcgagcccagctggtcagtatattgaaaccctgtctgtactaaaaatacaaataaaggccgggcacggtggctcacgcctgtaatcccagcactttgggaggccgaggtggttggattacctgaagtcatgagttcaagacgagcctgtccaacatggtgaaaccccgtctctactaaaaataaaaaatcagccgggtgtgatggtgcacacctgtcatcccagctaccgaggaggctgaggcaggagaatcgcttgaacaggatctcactctgtcagccaggctggagtgcattagtgtgatcatagctcactgtagcctcaaactcttgggctcaagcgatcctaccacctaaccctggcaaagtgttgagattacaggagtgagccattgcactcagccaagaagacacttcttatagaagaaagccttggggtacatgccataacaaatctggaaccatttgatctatagtgccaatagttcctagttaccttaatagctcctgacgtcagccaggtgcagtggctgacagcctttgggaggccaaggcaggcggatcacttgagctctggagttcaagaccagccagggcaatatggtgaaaccctatatctaccaaaaaaatacaaaaattagtggtgtgtgcctgtggtcccagttactgaggaggctgaggttggaggatcacctgagcccagggaggttgaggctacagtgagctgtgatcatgccagtgtcctctagcctgggcgacagagtgagaccctatttcaaaaaaaaataaaaagctcctgaagtcaccatacatgaacaatgatcctgtatcatttgagaacacaagtggtattctgtatactctccttactaagtttgggaggtataccatacctttaggaaggcgtccattcattagaggaaaagaagagtagttcattaagacctgattggttaaatggagatattgccatataaagagaaatgctttagaagaaagttgggtgtttccatttattcccttgttagcaagttcagtggcattgtggttgaaatttttgataggtgtgaaagatgaagggctgattgtgctttatgaatctgtcctgtgagtgtgaattttcattttctgctctgacagtgcctgtctttccctctaggtgtgtgggaatgccctcatgaagcaataccaggttcagttctggaagatgctaattctcatcaaagaggactactttcccaggtatcaggcttgttgagcagacagcaggggattaagtaactcataaccaggcctcagatacccaagggtgctattacctgctggttttgattcaagttaaaaacacctgtactaagtatgacatctttcctactccagtccctctcgttgatatttgaataaatgcttttgaaccttaatgagagtctgtcttaaatatcattgcccaaacaaaaacacaaattaggggctgagcacagtggcttatgcctataattatgcctataattgcagctctttgggaggccacaggaggaggatcacttgagcccaggtgttcaaaaccagcctgggcaatatagcaagaccccatctctacaaaaaaaaaattagccaggcatgatggcatgcatctatagtcccagctactagggaagctgagacaggaggatcgcttgagcccaagagttcaaggcctcggtgagctatgatcgcaccaccgcgctgcactccagcctaggtgacagagtgagacaccgtttccaaaagataggtgtatatcataggtgtgattcatgtgtctttctctccctgtagaattgaagctatcacaagctcaggacagatgggctccttcatacgcctcaagcagttcttggaggtaagatgcccttagaccaacatgccccacactgttgttgggctggaatgcacctatgtctgacaagtcttggaccttccgatgctctgattgcactctcttccttagttcttccaaacccttctttttgttcctaattccctcttaacctttggagtaagggctgccatttcctcttctttatatgtatcattctctatactgcctgtgagaaagctatgctgagatgagtaaaatatatttagtgtatctcctctcattaatatatattttttttgcatgttggccaaggttattttcttagtctcaggtctggggaattggtaagtgtcatcacttttctccatgagatcaaactgcactttcagttggactcttcccctacttccaagtgccaagagattgtaaaaggttaattttgacaaagaatttagaacactatagtgggtttgccaagatagcctgctgacttttcagcttctcaaagctcgattgtgaaaatagtgattgtgaaagatgaggttagcctgtagggagacaagagtgggacaggaataataagagcatttcatttgttgtctggagcagatcatgcagaagtggacatcttatacagaaccatcagtcttactggctttttcctttttgttcactgttccatagggctgaaatatggtgttcctcaaagcttcttttaaccattaagtgttgggaacactgttatcagaaactcattctgttttcttcatctttccctgaccagaaatgtttgcaacacaaggacattcctgtccccaagggctttctgacttcctccttctggcgctcctgatgtcactccatcacccaccatcaccgctgctgcaaagaggcaataataaaggaactgaagacagctgtatttgggagaagtcatgtcagattcagaaatttgccattatgtatttttatgtatttatgccttgtgactaggagaggagattttcatgggtcacaaaattcttggaggtcccttagtagatttggtagttccttaagagatccacgtgataaaataaatggagttggcctttcttgttttttgcaaaagtgataaaaggtctttagcacttggtctcctcccttgtctctagtgtctttcagaaagttggcaataccttaacaaatgcactctgagctggagggagcccaccatttgcacccacctacccaccctcacccctgttcagatgaatttccagaaagagctaaggctcataaggttcccttttaagtattatttaatagttgaggccagatacttacatgcaagtctgggttatggttgttttgcctttctcagcttgtgaagtcattctaaagctagaggaagtatgtgatatacacatggactaaggctcaggtgacactatggctagattaacatctgggattaggactggaaacacatgtcattttgaactaagggaaactctttgtcatcctaatttggaatttggtccctggatggctagggatccatgaaccaggcaggtaccttttttgtttttgttttgttttgtttcttttctgtttgaattaagatgggctaagatggggcttgcaacattaaacatgagctgagcatccataagcattgaattgggattaaataaagatgttgggcaggaactgaacactgctaatatgatgataaatatgcctgactaaagccactacagaaatccagagattggctgttaaaatttgttttgtggaaagactaattctctttgatactgcagaggcagtggccatggatctgttcctctgtgctaaatgtcttgtggcagggtgtgtttgtgggggagtgttcactggtactcttgagtggcctgaagtgacccattctatgaattgttaattaaggtgccaaaaaaaattaataataaagcttggttttttgaaaaacccattgctgata

SEQ ID NO: 12716 - DNA, 344 bp, Homo sapiens
tcaaaaaaaaaaaaaatttttttttaaatttttcaggcatggtggcacatgtctgtagtcccagctactcaggaggctaaggtgggcagatcacttgagcttgggaggtcgaggctgcagcgagctgtgatcatgccactgcactccagcctgggtgacagagcaagaccctgtctcaaaaaaataaataaataaataaggtagacacaatggaatgaacactggggacggagtcaggagaccccggctcaaatcacttttaggttttttggccttgggaaggtccttcacccgctctgaacctcagtatccccacctgtaaaacaaaagaactggacatgtca

SEQ ID NO: 12717 - DNA, 16083 bp, Homo sapiens
taattccagagataaagtgtccacaacagttagggaaatgatgctagagtaagtaaaaacaaaggtaataatttatagcctttaaataaaatcactgggaagggcaaacatttcttactgtgcccatcacctctaaaacttatgctaaaggttaatgaaaatgtatttgtgactgaagtttggtatccatccctttttttccccaaggcactttaaaaatcagcaggacaaccctgaggcaaactggaaggtaaaatatacttttattttacatcttattttctgttgatttagttgttttcactttctactgagtcagtttaatgccgacctataactactttgtcatcaagactcttgggtattcccctggaaaataaggcttcaaacataaaaattggaatacttactttcgaagttagtaagggcaccctttctgaactttattaagaaaaaataaaactcataatttgattatattatggctgtttgtggactggttaacattataaacaattctttaatatggtgtgcatttctagcttcaagattattaagtgacttgactgtggttctttctctatttaaagttgcctgaagattttgctgtggtgtttggagaagcagagggtgaacttgctgttggaggagtcttcttgaggatctttattgcacaaccagcctgggttctaagaaagcctagagaatttcttattgccctgttagaaaaattaactgagctcctagagaagaacaatcctcatgtaagcttcagtcaaaagcaaaacatttcaaagacttggctaactagactgatggtgtttctcttacaaccttattcacaaagaccatgaattaggaattggccagctctttcaatatagcagccacatttaaattcacatatgcccctcgatcatttttttgccatgttcaaaagtgaagctctttagtatgtttatgaaccaaagttatagagatatctatattgagaggatgctatttctaacagttacagaagcctgaaaagaaggtttttactgtccatctctaatgaatatgtaattttaaggagaaacctgtgtgttcggtgttcctctgagagtgtgttctgtttgggcatgtgctgcactctactttgtgtatatggcagggataaccctagtcaaagaaattgacagaagagtagtaactatgtggttgaatcctgtatctgtggctgaggctgccaggaaagcaggagtgagtgaaaaggtaactttggtcttgggtttggcaagccaaataccgtgatagtatataagattttgtttttcaaagtcttttttgttttcagaaggtttaagattttgttgagattgaagacagttgacctacatgattgttgtttaaacaggctggctacagaataaggtgattaagagcctgagtggtgttatttgatggttccagccataccactgaccaggtctgtgaccttgggcagtacctcatgactctgcctcagttgctgcatttatagaatagtcatagcagctgcctctgaggcagaggttctgatgagttaatacatatatagaatgcttaacataatgtctggcacatttcaagtgcttagaaattagttactatcattagcttagtaaaacatatttttaaaacatgattagcttgctgagtatttaccagtgctactttccatagtcatattcctccaataggatttctactacatacatagtttgcttggaaaatgcagtcctcaaaagctaaaacttagggaaagcacatagcagtttcctcctatatcacctttctttttggacacattccaattttaatgttaatttaagatgcattttattatgtttctggatgtgtgcatctagtggtataagctgaaggtctttccaatccgttatccacaatagaaagtgctttgtgggagccagacatgttaaatagtaggatttttaatgaaactgggaaaaacatttcactagttctgcattcttctggattattgttctgacactaacatacctgcaacatggtctaaaaatttctagtaatatcatttgggacatgatctcttaaacctgcaatagaggctgggcgcggtggctcacgcctgtaataccagcactttgggaggccaaggcgggcggatcacctgaggtcaggagttcgagaccagcctcaacatggagaaaccccgtctctactaaaaaaaatacaaaattagccaggcgtggtggtgcatgcctgtaatcccagctacttgggaggctgaggcaggagaattgcttgaacctgggaggcagaggttgtggtgagccgagatcgcgccattgcactccagcctgggcaacaagagcgaaactccgtctcaaaaaaaacctgcaatagaaattgggtatacctaaccgagtaaaatcctgcttagattaaaatagcatattcttaaagtcctttagattcatgccttttatgaaagaaaatgggaagttcgttgttctcttaggattagtgaatctgttttcaagtatcagcacttagaacttttgaatccctagttttgaacaccaaatacattaccttggatatttagggctgtatgagtattttatagttgatttatttttgttttacacctgcagggagaaactctggaaaccttgacaatggcaacagtgtgtctcttcagcgcacaacctcagctggcagatcaggtcccgccattgggccatcttcccaaagttatccaggcaatgaatcataggaacaatgccattcctaagagtgccattcgggttatccatgccttgtctgaaaatgaggtattgatgaatacacttagtagtttataagctccagaatttatctatgctcccttcttgacggatataagttgtagtattatataaatcccctttctgccatgtgtctttttgcatacgaaccacatggtattttattagttctgggtttatcaaaactggtatttatcaaatcagttttgataaataccagtttaggtgatataattaatagattaaatttggttcaattcattgttaaactgaaagtaagggattctttttttacttatttacttattttgttatggtatttactatgttatataaatattgccagtctacaagtaaccttctcttttgggcacttagctgtgtgttcgagccatggcatctttagagaccattggcccactgatgaatggaatgaaaaagcgagcagatactgttggtctagcctgtgaagcaattaatcgaatgtttcagaaggagcagagtgaattagtagcacaagtaagtgactttctagatttagcactattttaggaaagcaaacataccaagtagatttttacctatttggtactgatttggtttccttgacttaaggttggtgagagttaacttgtgagtttgtgtataaacaattttatattttatatatacaaacacatacagtagtgtgtataatacgtgtgtatatgtgtatgtatatatacatggatgtttgtgtatatatacacacacacaaaaatggggccagctgccaacagtcttaccaacttgagagtacttttatggtgtataaaatttacattttggctatccattgtgcaattagcttagtagcttgtttagcttgatttgtaaaatgtgcttcatcctctttggaaaaattcattcgtttatttattcctttgtttcttaagtcatgtttaagaaacatgccaagatactgcctttttcaaagagactatccacctaatgaaaactggacttggtggatatccatgtagacagatgttgatggaacaaaaaagatgcaataaatttaaaaacttacaaaagcgatctttctaaaatgtaactcaaagaacaaataccacatgatctgacttgtaagtggagtctaaaacaatcaaacttatgaagcagagagtagaatagtgattactagaggctggggttggggagaatgggaaaatgctggtcaaaaagtacagtttctgttaggaagaataaggcttttaagatctattgtgcattatgttgactatagctaataatacattgtatatttcaaaattggtaagagtaaattttaaatgtttccacaaaaaaataagtatttgtaatggtagatatgctaattagcttgatttattctgcattgtatgcatgtgtcataacatcactttatttcccataaatacatacaataaaaaataataaagtatttaaatagaattctgaaatataactgagccattcttcatcttaaaaaccattcagtggtttctcattacctgccagatgactaagtgacatctggtatccttagccagaatacaaggccctgcatctttattatctgggcttccccttctcccagcccctcagccttacccactggaccctcattgaggcaagtagagctgttgggtacatctcaaggagatactggatgctctaaggttcagacttatgattggcttgaggagtttgatgtgtaggaaagaacatgagctggtactaccacttgttggctctctgacctcagacatgatatttaaccttaaaatgctcagatttctcatctgtaaaataaggttgtgactatctcacaaggttgttatgagaacagtacctgaaaaaagaggtgcattcactaaatgtcttttatttcttcctattccctctgagtttcaaaatggatagtgaaaattgtgacattagattattattcagcttttattaggctgatatgaaatgtacgatgaccacaaagattgatgtttgaagaaaatatgaaaaaatactaatgtatttcagagattgttgcctattaatacagtgttactagggcaggcagcccagtataggggctaaaagctcaggttctatgttttctggctccagatacatattttaatactgcccagctctgtgattatgaacatactgttttaccctctgtgcattaattgaataaaataattgatgtatagcatttagaatggttaatggacagaataaaatctcattaaataaaaatgtcattagatacttaagcctgtgtatggcattaaaatacggtgcaacaggctgccttccaggtaggtcctgggggtaaaattatttcttcagtggatgatttgcattttttctgtgtgtttatatatgcttaatatttcttctaggccctgaaagcagatttggttccatacctcttaaaattactcgaaggcattggccttgaaaacctggacagcccagcagccactaaggctcagattgttaaagctctcaaggcaatgactcgaagtttgcagtatggagaacaggtgagtctgcatagagtcaacttttgatattctaaaagccagggtcttggccatggatggtccacgtacctgtgttcaagttccacttacagatatggttctgttggttgtaactggagaagatccagagcccaaggatggacttgcatacctgcctcataactgatgaaaaagcataaaccatatactcaatattcaggagaattcttctggatagtgatggcatgttgtacatttcaggaagaaaaatgctggaaatctttagcatggaatatgcagcatttagtgctgcttaagattaactttcagctctaggagttattcatgggtagtgataaccaaattcattaaccatcccataatgctattttaaaagatgtagaacatcatttttgttttcatttcctttcttgctggtgcttaaaaagtgttggtttttttttttctttggtcgtgactttgtttttcctatgtgtgttaatgtatttcagctgcacgtatttgctgacttcaggcctgttcagtaatttaattttcctcattggttttatttttattatttcctctaaggagttcctcattcagtgtactatatagccccatctactaatgctcatttttttttaattgacgtgaaatttacatagcataaaattaaccattttatggtgaatagttaagtggcatttaggacattaacagtgttgtacaaacaccaccgtatctagttccaaaacattttcatcacctctgtacccattcagcagctactctccctttcttccttcccccaacctttggcacccaccaatctgttttctgtctctggatttacctcttctgcgtatttcatataaatataatcatacatatgtgaccctttgtgtctatcttgtcatttagcatgtttttaagcatcatccatgttaccaatgcttcatttttatgtctaaatatgtcattgtacgtaaatgctccaatttgtttatccattcatctattgatggacatttgggttatttcccctactaatgttccataggttttaattgacttcagctacagcttcccggtaatgaatttactggatttgtatgtttcaagtaaagaaacatttttcataccattgtcattctatcaatatgatcatttaaatgatttaaaatgatattaggctgggcgcggtggctcacgcctgtaatcccagcactttgggaggccgaggcgggtggatcacgaggtcaggagatcaagaccatcttggctaacacggtgaaaccccgtctctactaaaaatacaaaaaattagccaggcgtggtggcaggcgcctgtagtcccatctactcgggaggctgaggcaggagaatggcgggaacccaggaggcggagcttgcagtaagccgagatagcgccactgcagtccagcctgggtgaaagagcgagactctgtctcaaaaaaaaaaaaaaaaagagatattaaagaagagaggcagcacttctgcagatattaaagaagagactgcagtattgctgcagtcattaactgatgtgtttttagaagtattttcttggtttttgcctatgagtgttctaaatgccaagcaaaggctctcctgcgtaccacttgcagcagttgtcttgtctttgacttgcctcaggattcctggtaatgaaattagcaaagtaatcctgacacccacttcctacacccaagggaggggaggaaagaggtatagtagtttctaaataggaactcccctaccagctttacaactaatcacttccactactgcttctttcccgggttggagcaggtgcccccctcccttggactcacatggtccccttgtataaccctactttaattcttaccacaaaattatttgacgctgtcttccctactagattgtaagcacttcagagacagtctgtctttctcatctttgtgttcactgtgcctaccacataagaggtgctcagtaaatactagatatgaacattgatgtgcaaaagctattcactaaggtggtatttcctaaatgttttgtcacacagaaatgtctttcatcttagtttagtgcatattcccacacatgtattatttatactcatatatgtgtatgtatttcaagtatatacaagtcctcattttacttctgatactctgatgctttctatattgaccaattttgttttttcaacaacactcctgattgtttcataaacctctttaggtcacagctcataatttgaaacactgctttaagttttagctcaatttggctgtaccttctccccaaactccttcctcaggaatagctcatcagcccatacactgtcagccatctgttactgtcacaagaaaatactctgcataggtatcttcctccttgaattacatataagtcggtaattgtaggttcaaataatagagtccagcttcagagggacgactgacttgaggacttctttgggtctgccttaatgagatgtgtctggcatagtgcctgctatggagtgtttgatgaatgctagttcttgctccatatttgggtctttcctcactggccttcttccttgttgctttggaagttggtttttctttttgtcttccaacatccagtccttgattttatgttcaaagggcttgttttactttcctaggtgaatgaaatcctgtgccgttcttcagtctggagtgccttcaaagatcagaaacatgatttgttcatttctgagtcacaaacagcaggatacctcacaggtaagccatacctaattggttattgtaagacacctggcagaagccacttggaccttccttttgccctaaatagacttaaaattgtgttcagagtgtttcttaggctaccagctgacctttcttggaggtgctatgagcatgtagtagacatatggtcttagctttatatagcatgcaaactgttgttgtgttgaatgggtactgactaaagcatgtattttgttcagttttgatccagttaattgggtcatagaatatatttggagcatgtctgtattaaagtatttatcttgtaaagagaaggaataaatatctgctgaggaatatcagtgtcagaaacatgattcatcattccatatctgtcagaataacagattaaaactccaaatatgtataattgtatgtaaaagatattcttggctgggcgcggtggctcacgcctataatcccagcactttgggaagctgaggcgggtgaatcacgaggtcaggagatcgagaccatcctgtctaacacagtgaaaccccatctctactaaaaatacaaaaaattagccaggcgtggtggcgggcacctgtagtcccatctactcgggaggctgaggcaggagaatggtgggaacccgggaggcagagcatgcagtgagccaagattgcgccactgcactccagcctgggcgacagagcaagactctgcctcaaaaaaaaaaaaaagatattctcctaagtttccagtgatttgtttatggttttgctaaatatttagggtgtgtcgttttatgggggtggaatacataggtatcatgaatgaaaggatgttttactgctttggtttcaaaagatactatgtttaaaactcagaacatttgacacactaattgcataattttagaatagtcattttcatataggcttcaacataagtcagactcttgctgaatgctaaagaggcaatatctagtctgctataaaagttcttaatttgaaattaaccttaggaatatgaggcggttcttgctgtctgcctgaaattgtagtatataaaaagatgtcagccctgcattctctcctaaccaaagatgataaactaagagaaaaaattatcacccagggtttctaagccattgtaattgttttaatcttgattgctagtatagaagtttataagatcatgaagactttatcttgaatattcaaaattagaggctttggaggaaattttacctggttttaattttaaacttggtgtgacacttttttttcttcaccataaccactttaatattgacactcctaaagttggagcagagtcctaaaatttataaacatgcagtgctttggctgcaggtcatgtcctgttcagaacagtgtcataggtttttattttaacttttccatcccctgtccctcatatctatggagaaaaatacctagactgtgttctcagtctgtcccatatctctcttcagatttggtgttaaaattatagcttctaagtaggagtttgttcttataggcagtataaaaactttacctctttagcctatgtccaaaagttcacataccacgttttcatggcattacattcattactttttgtataaggatggtatgattgaaaaaaaaatctgccttatttttattttattatttatttttttgagacagtcttgctctctcacccaggctggagtgcagtggtgcgacctcagctcactgcaacctctgctccctggattcaagtgattctcctgcctcagcttcccaagtagctggcattataggcttgcaccaccacacccagctaatttttgtaattattattattattattattattttagtagagacggaattttgccatgttagctatgctggtctcaaactcctgacctcaggtgatccacccacctcggcctcccaaagtgctgggattacaggcgtgagacaccacacctggcttttttttttttttttgcgacggagtctggctctgtcacccaggctggagtgcaatggtgcaatcttggctcactgcaacctctgcctcccaggttcaagccattctcctgcctcagcttcccaagtacttgggatgataggcatgtaccaccatgcccagctaatttttgtatttttagtagaggctggtctcaaactcctgacttcaggtgatctgcccacttcggcttcccaaagcattgggattacaggcgtgagccagcatgcccgccctcttttttttttttttttttttgagacagagtcttggtctgttgcccaggctggagtactacagcatgagctcagctcaccgcaacctttgcctcccgggttcaaacgattctcctgccttagcctcacaagtagctgagattacaggtgtgcaccaccattcccagctaatttttgtatttttagtagagacggggttttgctgtgttggccaggctggtctcggactcctgacctcaaatgatccacccgcctcaaatgatccacccgcctggtactcccaaagtcctgggattacaggtgtgagccactgcacctggtcagccttatttttcttaactaagagtaaattggccctgaagaatagtaatgtgtatattataagcttctctacaggaaagcctcttctaattcttctgttcagtcttatctatcattctttgacttaacttgatgaaataaaaaacatatgtccttgacttacagagtgtgaaccaaaaggtctgtggttagaatccagaagaaataggggtttatcttcagaaacctggacttcatttggtcctcacccccatccacatgctttagtaactatagggaaaaggtataggcagtaaaaagcttcttgtctgtgcctttccttttacttggatccatgcggtggcttctgaatgagatatgaaaagtggctgtgaaggggttagaagaaggttagggaaaaagaaaagttggggtatacaaatttcttcccatccctgagccggcttaagggacagcaagttctgtacaggtctggccaaatggggagatggtataaaacccaaccaggaaggggcatggagataatgagtcttccagaaggccattactgaagcctgcagacgtgtccatgtagaacagtctggataagctgtaagcattgttgaccccagaattgtgaaattctgagcatgttatcaatctgggatgctcttttttagcgatgtcagttgctggaaattttttcatcagctctagtctgtcctatttgaaaggaccaacttgccaggtgcaatggctcatgtctgtaatcccagcaattttggaggccaaggtgggcggactgcttgagtccaggagttccagaccagcgtgggcaacacggcaagaccccgtctctataaaaaaatacaaaaatttagccaggcatgttggtgcatgcctgtagtcccacctactcgggaggctctcttgagcctaggaggtggaggtcacaggtgagctgagctctcaccaccacactccagcctgggcaatagagcaagaccttgtctcaaaaaaaattaagttacattaaaaatgaaagaactatttcaagaattaaagcttctaactcttgctgtctgcctgaaattgtagtatataagatgtcagccctacatcctctaactacagatgatgtaggcaaattaagagataaattaggtaaatttactgccagttggattgatgtgtgctcattgcttgagttgccaaatgttttttgtgtttgagcttttcattgatgtattgtgtatcatgtgtttgataaaaggggcatgtagttctaataatgataaaatcccatgatgtggaactccaggaatttatagtgttgtgttgaattggaatttcatttagttaaaatgtgccccgtgctactcccaaacttcagaagatacagattgtacccagcccctctgtaatcattgaaatcaaggttgctgtgacaacacacatcaccaaccctttcttctaactgatatctttaggtgagtttggcaggttaggtggattttgtttaggacatggggaaagacaaaggagttaattactacttcaaagtaagataaaaatgaccaaaactacgttttcttctctctggctgctgagtaaatgtcattcagtcacatgcccaagatttggggtaaaaattttaaagtcctaggtaggattactcaatcttgataaatttaaatgagactgcctatttccataggttctctagcctggcatattttgttttatgataaatgcttatttaaaggtgcctcagtggaatttttcctgtgatgcagataaattgtggttactcattatccagggcccttgatcacttagccatttattaggttctagaacagcttggtgctgatggtctcagagcctcataaaaaataatttcagcagtgaaaatcctcaaattacctaacctagaaaatcagtagcaaaagaaggaacaacaggaaaaggaacagaggccagggtgaagatgcttctaggagccagaattggagatgaacttttcacatatacatttcatcgtggtagccaattcagttttgtgggattctctgtaaattttccatcttttctcatttctctgaagtccagcagccttgtgcaatcttgccacatgcccattcctggcagcccctgctcttcccatctttctctgaagaacacaactgccctattctgtgcaaatgaccaggcagcaccttttagccccaagaaaccagacacatcctcaaggagaggccagggtcctggggagagcatctcggatttcatttgtagaactatccgggaattgattttgatttgcctttcctaaagaggcaaatgatggtactaaaatttggtttcttccttctaagcccatcatttcaccatttagattttagctcagaggttcccacattttctcagttcacagtgcccttaatagctcagtaattttttcatccgtccccaagccaaaagaaatacctaataatttagtttatgaagtaattgcaagacaacttgaaagtagttgtttgtatggtggtcagcagatggcgctgtgtttcaaatttaaaatacccagcagttagctggatgatgtggcaggcaactgtagtccacatggacaggccgaatccgctactcagtaggctggggtgggaagatcacttgagcctaggagttcaaggcctggataggggagttgcttgagcccaggagttcaaggcaacatagtgagacccccatctgttaaatacacacacacacagaggggcaaagggaataaataaatatccagcaatgccccagggtgcctcagcacacagtttgagaactgcgtcattaatccactttctagatgcagcattcatggtttggtcttgtaacctactattttgatgggaaccaagttgagcccacaatcagaattgctcagaaactacacagtctggagtgtttgaggtcttactgttaagggttacatctttgatgacacctactggatggttttgcagtaatcatgctgcagcctaaagttcagagaatatgagggtggtgggaaatgatcacagggtgctgctgtagctctgaactgcgttgtcagaagggtttgttgacctggtggcctttttcctgagcagactgtgaaaggcctggcatcctgattggctcaaggcaggagttgatagatgcaggctcccacagtaccttaaaaaggagaaatattttttgtaagttctacaagtacaaggtttttataagtacagcgttccaagtacctgggcactctggttggcttcagttacagctcacacaggctgagtcatctctgcctatgtatctatacaagccatttcacatccatagtaccaatacttttaaggtcaaaaacaagatgaatctgaatggtggcctttttgtcctccaccaatccctgtttctaccttcatcaaactactctgctgtttgcacttcctcacaacttcccttgctgcttatatttcttttttcccctcaggtgtctctccttcccttctaactggcagcagcccccttcacctcaggagcgggctttagatccgctctgccaggcagcttgctaacttctgtgtagctctctgaagcaggtagagaaatgttttgctaaatgcatgccgctcccactgcctttctagtcctaaccctcaatgttccttagttgtttgccttgtttcctacaatttcagctaaaactattgctcagtatgcagtattatgctacagtgtcccttgcaagtacttgttagtttgtgcagtgcttctgagatgtaattaaatgtttatgcaatgtttaaaataaactctagagggctaaagccattaatatgcccataggacacatctcgataaatgctggcatatatggcattttcatgcaatagaaactgttagaatcaagggagaaatataagactaaaatatcagtaccctttcacatagcattcttgttttaacctatgacagatggatgtccagagccttttctttttcagagtccttggtttagcaacccttgttcgtttggtgttacttgttataatagcatttctttgcaccaaatgaaaataggttagtttgagtgttgacagaagtgtttatgttgaattttgtcacatatgacttttggatgagctgagtgtagagtttcttttgtctgtctgtttccattttttccattcgacatagttcttttcagtgctcggaattttttgaaagattgaatttcccaaatgtaagaaagaaaattttatccatatttccacaccagtgttactgtccagcatacattttgaaatgatttctagtctatagtgtaggcaaacatgaaaatagtactatgtagctgtttattaaggtatagatgtaatttaggtaattgaaatagatgattagttttgtgtgatggagtgcctgagcaggttctgacatttttataaaggtcaatgttttcacttgactgctttctagaggtgtgtgtttacctttctctcttgcaggacctggagttgctggctaccttaccgcaggtacatctacatcagtcatgtctaacctgccacctcctgtagaccatgaggcaggcgaccttggctatcagacttgaaatattcacgagagacaataaacgctgaaaggccagtgccaagtccacattcctccagctgatacgttgaagcaaactcttactgcctttctcctggtttcatgacagtgttattcctttttctataaatatatttttaggaaaaaaagtcagtgatcctaattgtatcacattataagaaagcactctgtggatcaacataagtgggtacacaagaattttttttttcttggtgtatgtaagcacatttgttcctttatatctgtttacaaaactgtgaatcaaaaagacaaaactttcttcctagtttttgtaattttttttttgaactagcatgactgtagggttgagctacagtcaacaaaaattgggctaagtcacttttccccaggaaagaatatttccctctcctgcatcaagtctgcgtggccatcctccccccaccatccaagactattaggttttgtccctgcacccttcactggcatcctcaatcattaaccttctgaaagctcacagtacacattagtatgtataactggctttaccaaattgaatgaaaaggagcttgtgcaaaaaaatttaaaaatggatgtcaagatgttatgtaaaagatgagtgtaattgtgaaatgttctatacactatcaaatatataaagctttctatattgaatgtacattatacagatcattcatatgtgtacataaaattttaaaaataaagggaattgactgctttgttaatgaga

SEQ ID NO: 12718 - DNA, 1805 bp, Homo sapiens
atggctaccaaccctgtgtttttataatgttaaaggactagaacaggtaaatgacattaatgttgatgagagtcaacatggtttaggttcctggtttaattttgttgttgtttgtatgattttacttggtttttccatagcctttctgggaaatataatttaggatctatttcttactccagatagaaagagataacagctttcataatgtggcagaagctacgtttacactcaagctgattcaatcactgattgcaagtggaatagcaggctctatgattggtgtgataacattatacaaatcccagatgtacaaggttggtattatgtattacagtatttgccatatattaaatattacaattacatattaccatatttgatattacatttatagtagttggtttggtgcctgaaaaacttttggtactgtaattaatatattaaaaaagaaacattctgatttttttctggtctggctttttttctgtataattaaatgtaaacctaacaaggtttaattaaatttagtttacagctgttgcggcaaaaatgcaaaaagcaaattagagggaagaaaatatggtgtatgctttgtagacagatgggactgaatctctgttatccaaaatgttcttttattattggtacattttatcagtaaatcaaggatagataccaaatattaatgtacacatgagccaattacttctaactagatttttctcttagtattttttatctgtttcattattagtttatcagctccaaattagcatatccaaatgagttacccagcaatagataaattgcttttgattttgtgtcataattaatatttttatctagtcatttatctatcattttagaaactagccaagtctatgtgagtcataaaagaaaaatgaaaattatttactattagttaaattacagtggttgctttgagcaggttcagaggcttaagttcttcacaatctcttactacatgattgctgttttttcttccacagctttgtcatttactcagtgctgtggactttcaccatcctgatattaaaactgtgcaggtgtccacagtagatgcttttcagggagctgaaaaggagatcattattctgtcctgtgtaaggacaagacaagtaggattcattgattcagaaaaaagaatgaatgttgcattgactagaggaaagaggcatttgttgattgtgggaaatttagcctgtttgaggaaaaatcaactttggggacgagtgatccaacactgcgaaggtaaaataaaaatgggtttaattcatgcatttcaagttcaaactgacttttatgggttaatgcttggggtgcttcaagcaggaacagctctgctgggggaagtaactgacatgataatattgggacctctgtaaaataaagaatagttgtctcatgtcgtatgtttttttaaggaagggaagatggattgcaacatgcaaaccagtatgaaccacagctgaaccatctccttaaagattattttgaaaaacaagtggaagaaaaacagaagaaaaagagtgaaaaagagaaatctaaagataaatctcattcataaaaagacatggtgtaaatattttgtatttatgtaaattcagactcattttacatgatatattttttatatttttattactctaaaccctcttattaaaaatatgatatttaaataacatagtaaacacatgtaaaaattttgttcttcaaaaaagtgtacaaaaggtagtataaaatcctactaataaaaataagcttttttctaagaagaatga

SEQ ID NO: 12719 - DNA, 1317 bp, Homo sapiens
ctgctgctcatttttctaaaaaatgttttattggaacacaattatgcccagttgtttacatatcatccttggctcttttcctctcataatatttactgtctgtatgtttataggaaaaggtttgctttagcttatgcatagacaattattttaatgtcactattaaaaataataatttcttaatagtttaaatatcacatttacatagattaatttccaatcatgcatattgttttgtaccactactatttgttttgttctctcatctgtttattcctgtgtcaatactgctcttataatacctttgtgtacatttaaaaccttgaaaagcaaattacttttcattatttactttcaaattttttctaggaatttcccatgcatttattttttacataaagtttagaaaaaaaatttccactttaaaaaactgagatcctgattactgttatagtaagatgacatatcggtttaaataaaattggaaatattgtgatattaaaagtcttccaatccagaaacatgctatgtctttctatttattcatgttttagtttatgtccttttataactttttatagctcttttcatgtaggcctactaattttaagttaaatttaatctatgatattttgtagtttttactactttttaaaatgagattttccttttgcatacctatttctaacatgaaattgttagcattaaaatctagctagtcaacttggattcagccactttaccaaattgctttattattttaagcacgtttttagtagtcttttatattttttaggcaagccatcaaatggagatatttttggtttttgactatgggaatagttactgttcctgttttttaatcatgatgactttcatatttcatctttgttactacgtttttacttggatattgttaattatacttttccatgtttagactgtttcttctattcccatgtcactatgaattttaattaggaatgtcttctaaattttattcaatacgattttagcacatgttgatataatcacgtattttttgcttttttctctttaatttgtttatataataaattatattgagaaatttacttaatgctgaaccagtagccatggagtatactttacttagttaaaaatgtgacattctaaaatatgatgctgtattattttgaatataatttattaggaatttttatatctatcttgaaaaagaaactggctatagctttctgtgatagctttatcaagttttgatatcttggtctatgtcttgagagaatttaaataaaggataattgctctgaacaaaat

SEQ ID NO: 12720 - DNA, 1317 bp, Homo sapiens; identical to SEQ ID NO: 12719

SEQ ID NO: 12721 - DNA, 1859 bp, Homo sapiens; identical to SEQ ID NO: 10880

SEQ ID NO: 12722 - DNA, 6410 bp, Homo sapiens; identical to SEQ ID NO: 10545

SEQ ID NO: 12723 - DNA, 407 bp, Homo sapiens
attttaccacatttgctttactattgtgtttgtctcttttttttgaaatggttgagaataagtttacagacatgatgtcccattgctaagtactacatggtgtatttcttaaaaataaggatatttttcaaaatcaggaaattaacattgataaaaactattttaagtaaaaaatgccttttttctcctccaagtcaggaatctaataccaaaatcatgttacatatagttgtcttctttcatcttttttaatctggaatggtccctcagtctttctttgtcttttatggcctttaaaatttggagaatacagaacagttttttgtttatttgtagaatgtccctcaattttggtttgcttgattttttgggaattagattttggctatgctgtgatcatatcagga

SEQ ID NO: 12724 - DNA, 1299 bp, Homo sapiens
gagatcctgcctcaataaataaataaataaataaaaataaagtaaatggaattacacaatatgtgcttttggtgactggcttttttcactttgcatgttttcaaggttcatccatttgtttggtgttttaaatcttatgtggttgagtttggtttcatgtcagtgtttatttgccttttgttttcaaagataagaccacttaaattattagattatttgaattctccttaagttataagtctggtcctgctatatcagttatctaagtatttagaaatggtagactaggggacctaggtttcttaaacttttctctcttttacttaggtgtgcaatatgaataaaatatcagtagatttgtattttagaaaatggggcatacaagattgggggctttattgacacatttaattctttcatgtgtaaaattacttatgtgaaaatgtgattttcttgttttttccccagactaaaaagtttttgttaattattatgagtatttctatagttggctgtttttacctggcaagaatgcttttctgctcagatgaagagataaaggcattaggcctgggatggacatttctgagtgaattaatgttggattggtattttttttatgagtggaagagacaaactatcttacatccattggttttaaaacattttttaatttcagtatatatatgtagagaaaagtacacatgtcataagcctatacagctcaatgaattttaagaaactgaacacacatgggtaactagcacccaaatcaggatatataaaatgttccttgcattccaaaagccttcttttgtgcttctttccagtcattatcctttctccccaaaaaggagtcaacaccctgatgtctaacagtatagaatagtttagttcatccatggatgcagtgagccaagatcacgccactgcactccagcctgggtgacagagtgagactctgtctcaaaaaacaaacaaacaaacaaaaaacaaaccgaaaatattagtctgtaaagattgatcttgagcctaaacttttagatgttttctatcctttgaacaaatgcttctgtatcttaagcttggaaggacactgggaaactaaacacttttaaaaggcacttttctttcaatagcccacttataaagtttgctttatctaccagtacgggggaaaaaaagaataaagttggttttattccatttaaagtagttttggtatttctttgctccataccaaagtcttcctcccccaaaataaacaagtgaattagaaccaaaaaaaatcaagaaaaa

SEQ ID NO: 12725 - DNA, 1381 bp, Homo sapiens
aataaataaataaataaataaaaataaagtaaatggaattacacaatatgtgcttttggtgactggcttttttcactttgcatgttttcaaggttcatccatttgtttggtgttttaaatcttatgtggttgagtttggtttcatgtcagtgtttatttgccttttgttttcaaagataagaccacttaaattattagattatttgaattctccttaagttataagtctggtcctgctatatcagttatctaagtatttagaaatggtagactaggggacctaggtttcttaaacttttctctcttttacttaggtgtgcaatatgaataaaatatcagtagatttgtattttagaaaatggggcatacaagattgggggctttattgacacatttaattctttcatgtgtaaaattacttatgtgaaaatgtgattttcttgttttttccccagactaaaaagtttttgttaattattatgagtatttctatagttggctgtttttacctggcaagaatgcttttctgctcagatgaagagataaaggcattaggcctgggatggacatttctgagtgaattaatgttggattggtattttttttatgagtggaagagacaaactgtcttacatccattggttttaaaacattttttaatttcagtatatatatgtagagaaaagtacacatgtcataagcctatacagctcaatgaattttaagaaactgaacacacatgggtaactagcacccaaatcaggatatataaaatgttccttgcattccaaaagccttcttttgtgcttctttccagtcattatcctttctccccaaaaaggagtcaacaccctgatgtctaacagtatagaatagtttagttcatccatggatgcagtgagccaagatcacgccactgcactccagcctgggtgacagagtgagactctgtctcaaaaaacaaacaaacaaaaaacaaaccgaaaatattagtctgtaaagattgatcttgagcctaaacttttagatgttttctatcctttgaacaaatgcttctgtatcttaagcttggaaggacactgggaaactaaacacttttaaaaggcacttttctttcaatagcccacttataaagtttgctttatctaccagtacgggggaaaaaaagaataaagttggttttattccatttaaagtagttttggtatttctttgctccataccaaagtcttcctcccccaaaataaacaagtgaattagaaccaaaaaaaatcaagaaaaagaaaaaagttaataatttcttctagttctcagagttttatataagactgtacaaaattatcgtcatttagaattttttttttcaccagccctgaatttt

SEQ ID NO: 12726 - DNA, 7301 bp, Homo sapiens
attattaattagatggcaccagtttagctctgtgtaaacttcaatctactcccaagtgcatgtaattcttccaaaaatatgggggaaaaataccttacctgaagcttctgtgggatttacccacttgcttcttgtcttgttcacctgacatttggtttctgcttgttacagaaaagaagaggaaaggctcaaccaagagaaaaaggtctctgtttatttagaagacacagactaacaattttagatggtaaggttcacaaataggttgatttctttcttcagctttctgacatgtccagcccatctctaatgaggactcccagatcatcactttatggctgttaggtgtttcccatatgaaattagaggagctgggtcagggagacaaaagtcttctattagtcttatggatagctcctccttgagtgtattttgtgcaaaagattaagaagctggactctactgccattaaagctgagagaatcctaaggttatttgtggcttcggggttatatttattactactactactaataaatattcaacaagtaaataaatcttttttaaatcaaaagattagtatctgcttattctttttttttaattgtaaaccaattatggtattaagagagtgactcaatagacatatctggcagtttttacaggagagcttttgtactatttggaattgatttcaactcctctcattagttattggcactaataactacctgaaatgaatccagttttagtaagcatataattttatttttccagttttcaggttcatcaggcttaaaaagtaggataatttatttttcttgtctttgtttttgagacagggtctcaacccgttgcccaggctagggtgtagtggtgcgatcttgggtcactgcaacttctccctcccaagctcaagtgatcctcctacctcagcctcccaagtagctgggaccacaggtgcgcgccactacacccagctaatttttgtactttttgtagagacggggtttccccatgttgcctaggctggtctcacctgagctcaagcgatccacctgcctcagcctcccaaagtgttgggattacaggcataagccactgcgccgggccaatttatttttcatatgctcagaatttctcccattctctgaaataggtccacacatttaatttctagatgttataaatccggacatgcaaacttaaattttacgctcataagaaagttcttgatattaatgactttatcctgtaaaactctggctctgttacacggaagaacattttttacagaccgttattagttgcaaagagggtcacatttttataggctaagctccagtgaaagacctcaaggatttataaaatagaatatggagtaaaatgattgtattgtaaaaccagaaaaccaaaattaacattagggagtttttaccaaccaatggctattgtctttttaaagttaaggggattatctaacaacttggggtcatggaaaataaatatgggagatgttttagatcaaaagaaacttaagagatgaacacaatcaaagtgcaatgtgtgatccccaactggatgaataatagtgtgaacaagctagttgtaaaaacaagcttagaggggcaattgggaaagtcttgaatatgaaaatgttaaatatatggataatattagggaattattgttagtttgtattaggtatagtgatggtattgtagttataaagaaaatgtacctattttgaaaaattcttactggagtattaggggtaaatgtcagcaatttactttaaaagcatatgaaaaaaagcaaataaaacaaaaaaggcttcagaattaggtgatgggggagatgaggggagaaaagaaaagaaaagaatgaattaatgaatttaagggatgggtaaattccacatactctgttctctacttttctatatgtctgattttgtttgtaatgagagtgagaagtggggagaatatgggatgtatgtgtgtgaacaagttgtgggtcatccaagtgtccatgcaaggtacttagaggccatgatttaaggatactaactctgaaaattatgtaataaggattaggaaacttcttttaaaaattaaattgggggagaatatgaatactttccctcagaatattttccttctaataacatatatgtaattcataatgccaagtattcctattgtactcttctcaatatattatccatttaaacttttgttttgtgttttaggaagctgagatgatttccaagaacaagaaccctagtatttcttgaagttaatggaaacttttctttggcttttccagttgtgacccgttttccaaccagttctgcagcatattagattctagacaagcaacacccctctggagccagcacagtgctcctccatatcaccagtcatacacagcctcattattaaggtcttatttaatttcagagtgtaaattttttcaagtgctcattaggttttataaacaagaagctacatttttgcccttaagacactacttacagtgttatgacttgtatacacatatattggtatcaaaggggataaaagccaatttgtctgttacatttcctttcacgtatttcttttagcagcacttctgctactaaagttaatgtgtttactctctttccttcccacattctcaattaaaaggtgagctaagcctcctcggtgtttctgattaacagtaaatcctaaattcaaactgttaaatgacatttttatttttatgtctctccttaactatgagacacatcttgttttactgaatttctttcaatattccaggtgatagatttttgtcgttttgttaattaatccaagatttacaatagcacaatgctaaatcacacagtaactacaaaaggttacatagatatgaaaagattggcagaggccattgcaggatgaatcacttgtcacttttcttctgtgctgggaaaaataatcaacaatgtgggtctttcatgagcagtgacggatagtttagcttactatgtttcccccccaattcaatgatctataacaacagagcaaagtctatgctcatttgcagactggaatcattaagtaatttaataaaaagattgtgaaacagcatattacaagtttgaaaatccagggctggtgaaaaaaatcaactctaaatgatgataattttgtacagttttatataaaactctgagaactagaagaaattattaactttttttcttttttaattctaattcacttgtttattttgggggaggaagactttggtatggagcaaagaaataccaaaactactttaaatggaataaaaccaactttattctttttttcccccatactggtagataaagcaaactttataagtgggctattgaaagaaaagttacaagcttaagatacagaagcatttgttcaaaggatagaaagcatctaaaagtttaggctcaagatcaatctttacagattgatattttcagtttttaatcgactggactgcagatgttttttcttttaacaaactggaattttcaaacagattatctgtatttaaatgtatagaccttgatatttttccaatactattttttaaaaaattgtatgatttacatatgaacctcagttctgaaattcattacatatctgtctcattctgccttttatactgtctaaaaaagcaaagttttaaagtgcaattttaaaactgtaaattacatctgaaggctatatatcctttaatcacattttatattttttcttcacaattctaacctttgaaaatattataactggatatttcttcaaacagatgtcctggatgatggtccataagaataatgaagaagtagttaaaaatgtatggacagtttttccggcaaaatttgtagcttatgtcttggctaaatagtcaaggggtaatatgggcctgttgtttagtgtctccttcctaaagagcacttttgtattgtaatttattttttattatgctttaaacactatgtaaataaacctttagtaataaagaattatcagttatataatttgtgtatatacatatctagaagttctacattgcagggaaaacagatggatatatatttaatctttaccaaaaagttttcttagtagagacaacctgcaagtcaataatggatacagttagtttctaatgggtaaacagaagtatacggatttccacagaattttcacactgttttggatagctgggaattgggcataacaacactacttagtttgagggctctttcaaagaaaagtatcaaagattctatttagtactttgcattacacttttaatagggaaaactactggctttcaagtctagtaaaggaatggaaattgaaaaatggaaacttattaattcttccccaaagcgaaagcatacttttattctcctgctttcattgacatgtggcaatttccagggaagaggcttactgattattaaagcagtgtacttattgtaccatctctttttcagaagtatgtgacgccatctcacttcaagtactgtgataacataactttcttacttttccaaccaaagacacagaaatcccagttcctcttttcctctaatacaggctgtaatgatttgatcatcattgccaccgccaaaagtaatttaacaaacacccaattttggaggctgcaatacctacactaaaaaggacaccaaccaatgaggcttgtggcacatatcactacaagcacctaatatatatttatctatactgtatgatctcccaggtgtttctgaactctaaatttacagtagtgtattctgagaaccttcaactaaatctcgagacgtaaaaacgatgtctgacatgcagtcagagcatcaaaattatttagttctgcagaattccataaaaacaaaattgtaattattccaagtccgtagcctacttcattttcaagcaaaagagagcatttagctcccgcctgaaagttaataaatctctggtcagtgaaaccaggtgtggttctggaaagaagccaggttcctatggtaacttcggatcgccatttaagttgtctctcggcctcctgctctgacgtcacttccggtgttacctgtgtcgttaccgggagctgtaaacaaggtgtgcaagcatctgaagagctgccgggatgcagcagagaggagcagctggaagccgtggctgcgctctcttccctctgctgggcgtcctgttcttccagggtgagtgctccggctggctacgctccacttccggccggggggttagggaagatggtcgcttttccggttccgggtaggggggtctccagaaagcccccgcatagctctgggaaggaaggagggagggagcgggacgttgggacgatgtcatcaccaccccgttgaggatagttggtattttgtcagtcctttcctgagccttgggagctttttcaccttgcgtgacctgtcattgtagtttggtgatagcatacttgatggaaccacaaagagctctggctttgggggcacccggtgttattttgtggtgttattatcagtggttgaccgctgtcgtttgggcgctgtataccctgattagaaagaaaacggttctagcattcagtagtttgccccagtagttttgggaaacaaaatcatgacagttggtaattttattttttgtaggtgattattgtagtctataaaatgaaatatttgctagtcacagaagggatgtgatgtgattcgttatagagaagaatatcgatgaaaaagtaactgctttagcattttcataactttttttaatacaagaaagagcatataaattctgttaaaatttattaagtaatatcagaagtagggtattcacactgacattcacatcttaaaattaggtgagttttgctttcatataattttcaaattgcataaatttcaatccagcctaattaccttcatcttaaggtacaattatttcctggattttgtgtatgtgtgtcttcctgggaaataaaatattagtatatctagtattagagtgaattgctaaatttataaaatttccttgagggtaatggggatttctgaaagagatatttaatattatataaatataaagactttaatataaagacttcagatgtcctaaatcttagcagttaaggctggaaagtttttaactggtgactaatattcatgttgccagcacacccccgatccctcccagctgcctgtgtcatcataagtctccagtttttaagctaaattactttgcagtatgatatttaggctggcctactgtcactcctaataaacccagtcctctctctctctctttcacacacacacacacacacacacacacacacgagaaatattcaaatattgtcttattgagaaaaaaaatctggaaatggtgttttcttaaatctaatgtcatgttgctttgaagagcatctgtcaagtccagcagaccatataattcaatcaaacatttaaagttgattttacaatctctatgtacttgtggaatagattttttgccttttaaaaaataactggtggcagggtgtggtggttcttgcctgtaatcccagcactttgggagaccgaggcagctggatcacctgaggtcaggagttcgagaccaggctgaccaacatagtgaaactccgtctctactaaaaaatacaaaaaaaattagccaggcgtggtggcgggcgcctgtaatcccagctactcgggaggctgagacaggagaatcgcttgaacccaggaggcagaggttgcagtgagctgagatctcgccattgcactctagcctgggcgacaagagagaaactccgtctcaaaaaacaaaaacaaaaacaaacaaaaaagaaacaactggtttatcatattattcacatgccatacaatttactgtcttaaagggcataattgaatggtttttagtatattcacagttatgcaataattaccactatcaattttagaacattttcatcaccccaaagagaaacttgatacccattaacaatcactcctcactctccatttcccttagcccctggcaaccaccagtctatttttttgtatctattgatttgcctattctggacatttcatataaatagaataatatctgtaatcctagcactttgggaggccgaggtgggtggatcatttgaggtcagaagtttgagaccagcctggccaacgtggtaaacaccctatctctaccaaaaaatacaaaaaaaaaaaaaaaaaaaaaaaa

SEQ ID NO: 12727 - DNA, 115 bp, Homo sapiens
gggcgcggtggctcacgcctgtaatcccagcactttgggaggccgaggcgggtggatcacgaggtcaggagttcaagaccatcctggccaatatggtgaaaccctgtctctacta

SEQ ID NO: 12728 - DNA, 114 bp, Homo sapiens
cacgcctgtaatcccagcactttgggaggccgaggcgggtggatcacgaggtcaggagttcaagaccatcctggccaatatggtgaaaccctgtctctactaaaaatacaaaaa

SEQ ID NO: 12729 - DNA, 13928 bp, Homo sapiens
acaagagagagcccagagcttacgtttgagaactatacgttcttcatccattagttatagtcaagagtctggagcagcaggtatttatgtctaattttttctaataaaatatttgacacaaaacactagttattttaactttttaaagttaagtattcctgttttcctttcacttgccgaaagtgtttttaagtgcatttctatcccagaagcactcattctttcctatggaagaaagtggttctgaaattagaaagattatactgtccaggaaaaaaggaagtgttgtgatgatttatataactgatagccaaagatagtctgaaactgttgattataaaggtatctgtccaggtatggtagctcactcctgtaatcccagtactttgggaggctgaggcgggccgaccacttaaggccaggagttcgagaacggcctgggctacgtggtgaaaccccatctctactaaaaataatttatattcctgccagcagtgtattgagataatcatgtactttatgctactagaaaaaaagtcacatgaaattttaacacagaatgttcgacatttaatacttttgtaacataaatgtttttttatacttgtttgctgattgatttgcttctctttcctaaagatttgtggaactcagtagtattagtgttaatttgtaggtatgggtccagaagcaattcagagaggacctgaatatacctaaactgttccctgaagagtcagcagtagccattgggtagttcacttggaaatgatattcctctcctccaagttgggggtgtgtatttattggtcacagaacacacagtcatacagagcaagagagaatgactctggaatcagactgcctgaattcaaatcccacattctctacttactccgtgagcaatcctgagcaagttacttgtctcatctttaaaataaagatactggccagtcacggtggctcatgcctgtaatcccagcactctgggagtctgaggcaggcgaatcacttgagatcaggggttcaagaccagcctgggcaacatggtgaaaccctgtctccactaaaaaaatacaaaaattagctgggcgtggtggcgggcgcctgtaatccccagctactcgggaggtgaggcaggagaatcacttgaacccaggaggcagaggttgcagtgagccgagattgtgccactgccctccagcctggatgacagagtgagactccatctcaaaaaataataatgatgataataataaaataaagatactaataatgcttatgtccatatagttgaaatagttcctggctcatagtaagtgcttttgctatatgaggtaggggaccttagagaaaccacagtcactttctagagatttaagtatgtctgggctatcattaaattaaaaaacgacagaaatggcttttattattttttaaaataaatcatgatttagttatccaaatgaatattggtcttcctcaacgtagtcaccatgggagtttttgtgtttatttcagcagtgcttccctggaatgcctcattggcataacttttaggatatgtcagcttagtatcagtttgatttctgagaatgactaaaagttgctttagagccaagtctagcagctagagtatcataccaggttggattattggtttggtatagatgcaaagtaagatgtgactatatgatcatgagtgatttttcttttatctaaaggagctttgagggtaattatgaaagaaaaccttaccaaatgcttttagccgaacaataacattgttggaataaatagtctcaaggcgattgttttaaaaaaaaacttcatttggaatttgttccatgtttgtttaaaaatcttggctgggcgcaatggctcacacctgtaatcccagcactttgggaggccaaggcaggaggatcgcttgagcccaggagttcgagaccagcctaggcaatgtggcgagactccttctctacaaaaaatttaaaaaattagccgggcgtggtgatgggcatctctggtcccagcaagccaggaggctgaggtgggaggatcgtttgagcctaggaagtcaaagctgcaatgaaatatgattgtgccactgcactccagcctgggtgacagagtgagaccctgtttccaaaaacaagaggaagaattagaaatgcagtgagggctgggcgcagtggcttatgcctataattccagcactttgggaggccaaagcggccagattgcttgagctcagaagttctaaaacttcaacagcctgggcaacatggtgaaatcccgtctctactaaaaatacaaaaattagccaggcgtggtggtgtgcatctctagtggtgtgtgccagctacttgggagattgaagtggaggattgcttgaccccaggaggtggaggttgcagtgagctgccattgtgctactgcatgctagcctgagcgacagaacaagaccctattaatttaaaaaaaaaaaaaagtgtagtgaacttggcttctcgcagactcgtagaaagttaaaaaggaagctaccatctaaatggttttattattattccagatattttggtattgttttctgtatcatgatagtctaaaaaactagttttacttttaatattaattggtataataattagttgttttttttccccagtcactgaagatgtgtgcttagttacataaagtacattaatatttgtgtttataaaataatacaatatttatagtataatgtttatatatgtgtttaaattgtgacagcactgcatccacttgaggctcttttttatagctactaggaggtttaggcacttggagttaaattttaaatgaaccacatatttttcatttttgttaatgtagttttcccattttatgcaaataaaatatttaattggctctccactcctgcctctgtccccttaccgctaccaccctaagagattatcattgttaacatttgaggacatggtgttttgtaacctgttgttttttcttaatatgacaatggcccatattttagcagtaaacaaaaagatacagaagatgaaagcttagccaaacactgtaaatagaaatgggaagctttttcatatcggggaacggtggcttaattgattcttggggaatgggggatcaactaaccataaacaatttcatttaggatttttgcatcatgagggtatttggagagaaatatatcatcctataatgtgcacagtaagtttttcctaatttgttgctttgaggaaagacacaaagcaaactaaacagcctttcatagataaataagtatacagagagtgaaagatatgggtacaagtatatagagacctatcaaaaatacattgcttgtggtattaattctcatgtgtgattttagcatattaaaaggctgttttgtgtttttagaaccataagaataaatggggatgttacctttcagtttgttccaaagattgcatgcatcattaccaaagcttgagtctttttactcccctgtcttgttgagatacctactacttgagcatactctggaatgagaaagtttatcgattaacatgctgcttacgcagataggattagcatttccttaatttagtataccacgtgttgtatcaggcataaaagccagctttttttagtcataccccaatgtttaaaattgttaaatgcagacttcatgttcttttgatcatttaaatcatgacatggatatttttaatttttatattctagtaattatcaattgtcctggtctggctgcttagagtatcagtttgctcaaaattgcttgaatcattaaagcaaatactaattgtgagcattgaccagatcttaagttaaaaaaaaaaaaaaagcatctttggtcctagaagaagtgctaaggaaacctgaattaactgataaagcacaggtaaagtttgaccataaaacttgtagaaagaatggaatatagcttaatgcttataatgtaagacattggaacaaatacttaaattcagtggttagcactataaatatcttttcttaactgtgagtagttggaaaatatagctggctaatagtaattacaagttactatttaaacagatgccaacatgcaaagtagttgtataattttcctaaagttatgttacacttgattttaacttgacgccattgtgcattgtaaccatattattatacaaggagcatagaccaacaacagttgagtaaatgggtgaataaatgaataaaaaggataaacacaactaatttaaaagtcatgagcataactaacaatgattgcttttattctgaaactgttttccatggtttataacgttcatagccatatgacccttccttaatctcttccttccttccttgtattttgggtactgattctttgcaaggtccatctctcttttgtgtgaagtaaaatactgggaaaaggctgcttttctaaagatacctgttttgctatttttatagtgcttataactgatgtaattagaagaaataaattcatagtgctttggatatagcacctcagattaatatcaaattgtcacctcctgttagtgttcattcactaaaggaatagtgtacagaacgtgtacatttgaattaagggaagatggttagaaaagttctggaaccgggaactaccattcagaagacttctatgggaccaggacaaagacaaactttacgtagttcacaatttgcctagagctgtccttgattctcctttctctttttattctttttttattctttgttctcattgttttactactatgttttaaaaatgtttataacttgatattttaatgtaaagtatgttttcttagaagggaagaaaaaatgctttatatactaaaaacagcaggctgaagctataagttaacaaactacatcttaagattttttgacagtgctacaattggtaaactgctagaagttatttttagaccagttttatgtacttaatagatttctctgtgttcccaatagctgatgatataaagccatgtccacgatgtgctgcttatataataaagatgaatgatgggagctgcaatcacatgacatgtgctgtttgtggttgtgagttttgttggttgtgtatgaaagaaatctcagatttgcattatctaaggtaagcttatagaaggagctatttatatgtaaatgtaattttatattgtaagacaaaataacttgtcttaaatttgggttttataagatacttaaagggattggttttattctagttaaataaatttaaaagaaaccaagttattatgctagtcatttggaattaataactagtcaaaataggaaatggatatttcctttttttgtttttgttaaactagaatgctagtaagtatgtaataccctgtgtaattatgctagacccataaatactttcatttaattttcccatacataaattttatcatttaggcacagagtgagtttatgatataatcagataattgatgcctaaaaatatgcatgttttgcattagtttactattaaaaaactgacttaagggtttgaggataatggaggactagggataaatttttaacctgaatctcagttatcagtatcttgttaatataatttacagtggttcttaccttatacttcattgaattttcccatacataaattttatcgtttaggctacagagtgagtttgtgatataatcagataattgatgcctaaaaatatgcatgttttgcattaatttactattaaactgacttaagggtatgagggtaatggaagactagggataaatttttaacctgaatttcagttatcagtatcttgttaatataatatagattaaataataaaatataatataaaataagatatatcaatatcttgttaatataatttatagtggttcttaccttagtttaatgaactcagaatttaaaggggaaaaaagctcctaactatgagaagtttttaaaaatagtcattgttttaatatagtgcactaatttgttattgtggtgttttgcagcagttatttacattataattttttccgttagtccatcaggatgtactttttgggggaagaaaccctggagccgaaagaagaaaatattgtggcaactgggaacactggttggtgctcctgtcggaatcgctttaatagctggcattgctattcctgcaatgattattggcattcctgtgtatgtgggccgcaaggtaaaatgcatacttcttgttagtccattatcttattctaaatctttaggtgtattcttttagtattgatgatttttgggtttttttttttttttttttttagacaaagggtatctttagtttcttcagtataaaacagttactcttttttcataaatttttagtgtttggcaagcatatataaatacgtataaagcagacttgctttaaaatgttctgaatctgaaaattttagtatgtttgtattataaaactttgagtataaaatattgaaggatacacacctgagatttttctcataggtatatccttgtaaggtcaggtctatgagatctttttaatgaaagttaatagctaaataacacatgccctcaggcaaagaataattagccagttcttgaattatttctgctgtagttcaaagctttttttttggattactgcttttaataaatacactattttgcaaattataacaatcttgtgaaagtccaaacaccagtgactaccactggcctctaattgatgaattatatttcattagctaagcaaatagttcttttgttaagggttaatgggataatttatgaggtcctaagaagtctgttgttgcctaaattaatagaatctctggattgagaagtaactttcagtagaatatagctaaaagaaaaaaaaaagaaattttctttggtatccaagaagatcaaaaaaattaaaactttttttaaaaaataaaaagaaattaatcccaaccttgtacccaagcagaacaaaggatagcaattttcaaaaagggaactaacaggccaggtgcggtgcctcacccctgtaatcttagcactttggaaggctgaggctggtggatcatctgaggtcaggagttcaagaccagcctggccaacatggtgaaaccccatctctactaaaaatacagaaaaaattagccaggcatggtggcaggtgcctgtaatcccagactcgggaggctgaagcaggagaatcacttgaacctgggaggtggaggttgcggtgagctgagattgcaccattgcactccatcctaggcaacaagagcaaaactccatctcaaaaaaaaaaaaaaagaactaacaagctgggcatggtggcttactcctgtcatcgtagcactttgggaggctgaggcagaaggatcacttgaggctgggagttcaagaccagcctggacaacatagtgagaccccatctctcaaaaaaatttaaaaattatctgggtatggtagtatgcacctgtagtcccagctacttgggaggctgaggtgggaggattgcttgagatgggcaagtggaggctgcagtgagctgtgattgtgccacttcactccagcctgggtgatagagcaagatcctatctctaaaataaaaaaaggatctaaaggttgtcatactgtgtcataggtgttgtatgtacttttacttattttaaccctgcagcaacctcgatatttcggtctctgtgtgttaaaatattgagatttaggaaagtttatgtaatatatcttcagttacacacaaagaagcagagctgagatttgaactcagatgcatgaattcttaatataagttccatgattaagtttcagtagctatttgggaactcagtcatggggaaaccaccaactcatgaagcaatccattctgttgtaaaatggctactaattgttacaaaattgttacgtttgagtcagatctgtttccttttgtttcctttatttctgtttctaacttctgggacccgactgggaataaggttgatcttcttctgtaaaacagctgaattttttatattcaacatacattttataatcagaaaaataatatatactatttcttaaaaattagttttggggctgatgacaaacatatttataagtcacatatttatttctgaaggttttaagtgagtaaacctggactttaaaaaatgttgggccatgtgtggtggctcatgcctgtaatcctaacacttggggagggtgaggagggaggattgcattaatccaggagtttgagaccagcctgggcaacacagtgtgacaccttgtctctacaaaaaactaaataatcagctgggagtggtggtgcatgcctgtagcccccgctattaaggaagctgggatgggaggattgattgagcccgtgaggttgaggctacagtgagctgtgatcgtgccactgcactctagtctgagcgacacagagagaccctatttccaaaaaagagagaaaaaataaaaaatttcaaaatatattagctgatcgtaatttttcatgtagttattcaaagcaaggctttgctgaaaacaaaactattcagatacttagaagggaaagagagactgttgtaccacatgtacctataaatcatttatagagaagagattatttacctcattgttcaggtcatagggtacagttacagatctccttttttcaaacatgtacccaaagggttgtaaatgaatgaattagttttccattgaaataatattctgtggtgctttgggatcccaaccagcctaggaaaacctgctaagtcaataaagtacccaaaagctgagccttcacttaacaataaaaagtagagaatgtggcaaaaaatagtaaacagaaaaattaagttgaaccagaaatagtgggataatgtgatcactaatcaaacattggtgcttgaggctgaaaaattttctagaagactcctttctcttggcagcctgcctttgcaagtctgctccatcagttgtgccttttctcttcttcagtgctaagtttcccaggaatgggagtggggaggagcaggaattagctgcagtgctgaaggataatgaaaggtaccttgggaaggtctaccatctctgcctgcatggactgtgtagggaagtgaggaggctcattgacaaggaacctctagtcaatgctgggaaatgggattctgactaggaaatagaaaggtttcttgtcccatacatgcatcacccacctcccaccccaacctttctactgttttccacaacactcatcgtactttacagccttccaaaggccaaaggtgttattataccatgtaataatagattattttataagtcccatctgtagtattgtttataagtcattttattttagagagtccccatacttttgaggctgttttgaatttgttttggaacagagggggaaaatgtgccatattagcccttgcaaaccatgaaaataaagatctcaaagttcatataatttcacaagccagtttttaatcaccgcttctatgatgatatcaaattctacttattaacacctgtcctgtacagagattgctgagtgaattcaatcctgtcttctggtagccattatttatcatcttttttctttctctgccatttactttgagctataaatgagagccctggaatttgagtcatttgtcaatattgtcttcataaaaaggatctgagaaaaaaataatactgtttattcatacttgtttattagaactgctttttaaggtcaatttttaaaaagaaaccttccctagaagccaatttttaccatttagagaatattctttagaaagaaacctttagaatgctggaagtatcctgttggtgaaccatgtaactcataactgtgttgaaaataataatcttaatttcttcctctttgctcgatacataattacactacttttgattaagattataaagatgacttttactcagaacttttaagcacaaagtaaaatccattaaatcactgtcttaagcaaattaataaggagcaaattatttgtgagaatatataatagtttaaggacactagtaggtttaccttgaactaagatactcagctacgaacttctatgaaaaatcactttagcaagtatagatctttttcaactaagttaaattgtaatgtattttctctttaatcccccacccctatttttattaattcaagattcacaatcgctatgaaggcaaggatgtttcaaagcacaaacggaatttggccatagcaggtggtgtaacgttgtctgtaatcgtgtctccagtagtagctgcagtgactgtaggtaagaaaatgctgaaaagtactaattacctacaattttatggagttaaagttttgtggaaggattttttttaattgttttttaatttgaggacaatttaaattgagcctgcagtaagtcttggttgaaagtattacagattcaagagcctagccttaaagtagttggtaaattgttagtggctgatacccttcctccccactccaccccaagtacagttcggaggcctggcacttcaaaagaaaaaagtttgcatctctctctttttccccttatgtgcattacctgaaaggctgggaaccttgaatttgcttaacaactgggtaaatctacttttggcaaatgttccagccaactcttcagaaccctggcgcttttctctgtatgactctcttgaaaagactttctaaaactcatgtttctgtgagttattttgttgttgttgtttgtaatgactgatttaatttctctttaggtatcggtgttcctattatgttagcttatgtctatggcgtagttccaatttctctttgtcgaagcggaggttgtggagtctcagcaggcaatggaaaaggagttaggattgaatttgatgatgaaaatgatataaatgttggtggaactaacacagctgtaggtaagtcctttaagcaaaggaagaaaatgtgcttattaacagtgtaagtagtggggaggccagagataacatgcaactcagaatttccattgccatccttttactaggcctaatagtattcattcagaagtacataagtgaataaactgccaaggaggagtgtatggatgaaagaggtgggggtaattctgggtatctgacctctaattggaatataatgtcttagaaatcataaacttttcatcttaaattttgcctgaaacattataaataactaagtaaaggatatgaagaggaatacagttaataaaagaaatacggatgaccaataatacaaaaatatcttcaactcaatgttattcaaagaaatgtgaattagaacagtaacgagcaaagattaagaagaataaaaaagccttcatagactgcctataggagtatgtcaataaaccttttttaaaaagtgcatgttctatattctagcaattcttgttttagaaatttgtcatagggaaataattaggcagatgtgtaaagataatgcctactttcttacctcttattttctcttgaactggcctcaatcagatttttgtccctaccactccagaattttatttctgctattcactgaagcagagtcaccagtggcctccacgtaacctaatacagtggtcaggtcttggtcctcatcttaacagtatatccgacatggtagagactctacccttcttgaaatacttcacttttcttatgggaaaccacttcttaccatatttcctggccagtccgtctcattaatctttgctggttcattttcctcttctgacctctaaatgtttgttccccagagctcagttctcagaattcttatgtatctacacttttcccctaatctcatctattaaataatgcatagaccgacctctcccctgaacttcaaacttgcatgtgtaactttcctctttaatctgcacttgagtgtctaacaagaatttcaagcttaacttgtctacagccaaattcttggctctaaaatctcttcttcccttcatcctccttaactcaataagtagcttctccattcctcctgttgcttgggccaaaaaccttcacttaacaatgcctccctcttttccctcttgtcctacatctgattgatctgtcagcaaattctgctgcttccttcaatatttagccataatccagccacttcttactctcttcgttgtccttcccttagtccaagctaccatcctctttcctgggctattgtaatagcctcttaactgctgtatcaacttctcagcttctattcactagtccatagtgcagccatagtcacatgtctaaaccctgtcagattataactttcttatgctcaaaacttccccagtggcttctaactgtactggggaagaaaatccaaagtccttatcatagcccaaaaggccccacatgatctgccccaactatgtctctgagctcatctcttgtcaccctcttattttataccactcttgcttgatttttgagggtgccaagcattatcctacttctaggcttttaaactggcagttctctgtctggaatactctttccctagaaaatttcatgactcactgttttacttcatttgtctctacaagtattaccttatcaaagaggccttctgtcatcacatcatataaaatggctcacagacatgtacgtacatgcacttttcatcactctcctcccctttactctcttgtatttttcctcatagcatttgtcaccgtgtgattgggtatataataggaactcaaatattggtgcaaataagtgactccttaatacaaaatgtgtgagaggtactgtaaaattggaacatagtgttatcagatcttaataatagcttgtagacagaactgtggcatatatctagaaatcaacttttagcctattcttactgacctagagaataataagctctttaaatgacacccttaatgaaaactgtcacataattttcctctaaagtcagcgatattttttaacaatcatattctttatagaattcctaaatctgggtttttgaaaaaagaaactagtgaccatttaaaattgttggctctattcccactgcttctagtggactagcctgaaaaaaatatttttccatgtctgcgtatattttataccttatataatgtcctctctgaaatcatggaggaatttaagaaggagaaaattgataatcatacttacttagtttctttggaatatttgcatttagacacaacatcagtagcagaagcaagacacaacccaagcataggggagggaagtgttggtgggctgactggcagtttgagtgcaagtggaagccacatggatcgaataggagccatccgagacaacctgagtgaaacggccagcaccatggcactagctggagccagtataacggggagtctgtcaggaagtgccatggtaaactgttttaacaggtgtgtgttttggtttggtttggttctgctttctggtaactacaaattattaattaggtgagaattttgaacataaagcatgatgattatatataaccctactatgtcaaggttcaaaatagtaatgttaaaaatgaaatttggggccaggtgcagtggctcacgcctgtaatcccagcatgttgggaagccaaagcaggtggattgcctgagctcaggagttcgagaccagcctgggcaacatggcgaaaccccatctctactaaaaaaatataaaaaattagccggatttggtggcatgcacctgtagtcccagctggtcgggaggctgaggtaggaggatcacttgagcctgggagttggaggctgcagtcagccaagatcacaccactgagctccaacctgagtgacagtgagaccctgtctcaaaaaaaaaa

SEQ ID NO: 12730 - DNA, 10956 bp, Homo sapiens
  SITE (5272): n equals a,t,g, or c
acaagagagagcccagagcttacgtttgagaactatacgttcttcatccattagttatagtcaagagtctggagcagcaggtatttatgtctaattttttctaataaaatatttgacacaaaacactagttattttaactttttaaagttaagtattcctgttttcctttcacttgccgaaagtgtttttaagtgcatttctatcccagaagcactcattctttcctatggaagaaagtggttctgaaattagaaagattatactgtccaggaaaaaaggaagtgttgtgatgatttatataactgatagccaaagatagtctgaaactgttgattataaaggtatctgtccaggtatggtagctcactcctgtaatcccagtactttgggaggctgaggcgggccgaccacttaaggccaggagttcgagaacggcctgggctacgtggtgaaaccccatctctactaaaaataatttatattcctgccagcagtgtattgagataatcatgtactttatgctactagaaaaaaagtcacatgaaattttaacacagaatgttcgacatttaatacttttgtaacataaatgtttttttatacttgtttgctgattgatttgcttctctttcctaaagatttgtggaactcagtagtattagtgttaatttgtaggtatgggtccagaagcaattcagagaggacctgaatatacctaaactgttccctgaagagtcagcagtagccattgggtagttcacttggaaatgatattcctctcctccaagttgggggtgtgtatttattggtcacagaacacacagtcatacagagcaagagagaatgactctggaatcagactgcctgaattcaaatcccacattctctacttactccgtgagcaatcctgagcaagttacttgtctcatctttaaaataaagatactggccagtcacggtggctcatgcctgtaatcccagcactctgggagtctgaggcaggcgaatcacttgagatcaggggttcaagaccagcctgggcaacatggtgaaaccctgtctccactaaaaaaatacaaaaattagctgggcgtggtggcgggcgcctgtaatccccagctactcgggaggtgaggcaggagaatcacttgaacccaggaggcagaggttgcagtgagccgagattgtgccactgccctccagcctggatgacagagtgagactccatctcaaaaaataataatgatgataataataaaataaagatactaataatgcttatgtccatatagttgaaatagttcctggctcatagtaagtgcttttgctatatgaggtaggggaccttagagaaaccacagtcactttctagagatttaagtatgtctgggctatcattaaattaaaaaacgacagaaatggcttttattattttttaaaataaatcatgatttagttatccaaatgaatattggtcttcctcaacgtagtcaccatgggagtttttgtgtttatttcagcagtgcttccctggaatgcctcattggcataacttttaggatatgtcagcttagtatcagtttgatttctgagaatgactaaaagttgctttagagccaagtctagcagctagagtatcataccaggttggattattggtttggtatagatgcaaagtaagatgtgactatatgatcatgagtgatttttcttttatctaaaggagctttgagggtaattatgaaagaaaaccttaccaaatgcttttagccgaacaataacattgttggaataaatagtctcaaggcgattgttttaaaaaaaaacttcatttggaatttgttccatgtttgtttaaaaatcttggctgggcgcaatggctcacacctgtaatcccagcactttgggaggccaaggcaggaggatcgcttgagcccaggagttcgagaccagcctaggcaatgtggcgagactccttctctacaaaaaatttaaaaaattagccgggcgtggtgatgggcatctctggtcccagcaagccaggaggctgaggtgggaggatcgtttgagcctaggaagtcaaagctgcaatgaaatatgattgtgccactgcactccagcctgggtgacagagtgagaccctgtttccaaaaacaagaggaagaattagaaatgcagtgaggggccgggcgcagtggcttatgcctataattccagcactttgggaggccaaagcggccagattgcttgagctcagaagttctaaaacttcaacagcctgggcaacatggtgaaatcccgtctctactaaaaatacaaaaattagccaggcgtggtggtgtgcatctctagtggtgtgtgccagctacttgggagattgaagtggaggattgcttgaccccaggaggtggaggttgcagtgagctgccattgtgctactgcatgctagcctgagcgacagaacaagaccctattaatttaaaaaaaaaaaaaagtgtagtgaacttggcttctcgcagactcgtagaaagttaaaaaggaagctaccatctaaatggttttattattattccagatattttggtattgttttctgtatcatgatagtctaaaaaactagttttacttttaatattaattggtataataattagttgttttttttccccagtcactgaagatgtgtgcttagttacataaagtacattaatatttgtgtttataaaataatacaatatttatagtataatgtttatatatgtgtttaaattgtgacagcactgcatccacttgaggctcttttttatagctactaggaggtttaggcacttggagttaaattttaaatgaaccacatatttttcatttttgttaatgtagttttcccattttatgcaaataaaatatttaattggctctccactcctgcctctgtccccttaccgctaccaccctaagagattatcattgttaacatttgaggacatggtgttttgtaacctgttgttttttcttaatatgacaatggcccatattttagcagtaaacaaaaagatacagaagatgaaagcttagccaaacactgtaaatagaaatgggaagctttttcatatcggggaacggtggcttaattgattcttggggaatgggggatcaactaaccataaacaatttcatttaggatttttgcatcatgagggtatttggagagaaatatatcatcctataatgtgcacagtaagtttttcctaatttgttgctttgaggaaagacacaaagcaaactaaacagcctttcatagataaataagtatacagagagtgaaagatatgggtacaagtatatagagacctatcaaaaatacattgcttgtggtattaattctcatgtgtgattttagcatattaaaaggctgttttgtgtttttagaaccataagaataaatggggatgttacctttcagtttgttccaaagattgcatgcatcattaccaaagcttgagtctttttactcccctgtcttgttgagatacctactacttgagcatactctggaatgagaaagtttatcgattaacatgctgcttacgcagataggattagcatttccttaatttagtataccacgtgttgtatcaggcataaaagccagctttttttagtcataccccaatgtttaaaattgttaaatgcagacttcatgttcttttgatcatttaaatcatgacatggatatttttaatttttatattctagtaattatcaattgtcctggtctggctgcttagagtatcagtttgctcaaaattgcttgaatcattaaagcaaatactaattgtgagcattgaccagatcttaagttaaaaaaaaaaaaaaagcatctttggtcctagaagaagtgctaaggaaacctgaattaactgataaagcacaggtaaagtttgaccataaaacttgtagaaagaatggaatatagcttaatgcttataatgtaagacattggaacaaatacttaaattcagtggttagcactataaatatcttttcttaactgtgagtagttggaaaatatagctggctaatagtaattacaagttactatttaaacagatgccaacatgcaaagtagttgtataattttcctaaagttatgttacacttgattttaacttgacgccattgtgcattgtaaccatattattatacaaggagcatagaccaacaacagttgagtaaatgggtgaataaatgaataaaaaggataaacacaactaatttaaaagtcatgagcataactaacaatgattgcttttattctgaaactgttttccatggtttataacgttcatagccatatgacccttccttaatctcttccttccttccttgtattttgggtactgattctttgcaaggtccatctctcttttgtgtgaagtaaaatactgggaaaaggctgcttttctaaagatacctgttttgctatttttatagtgcttataactgatgtaattagaagaaataaattcatagtgctttggatatagcacctcagattaatatcaaattgtcacctcctgttagtgttcattcactaaaggaatagtgtacagaacgtgtacatttgaattaagggaagatggttagaaaagttctggaaccgggaactaccattcagaagacttctatgggaccaggacaaagacaaactttacgtagttcacaatttgcctagagctgtccttgattctcctttctctttttattctttttttattctttgttctcattgttttactactatgttttaaaaatgtttataacttgatattttaatgtaaagtatgttttcttagaagggaagaaaaaatgctttatatactaaaaacagcaggctgaagctataagttaacaaactacatcttaagattttttgacagtgctacaattggtaaactgctagaagttatttttagaccagttttatgtacttaatagatttctctgtgttcccaatagctgatgatataaagccatgtccacgatgtgctgcttatataataaagatgaatgatgggagctgcaatcacatgacatgtgctgtttgtggttgtgagttttgttggttgtgtatgaaagaaatctcagatttgcattatctaaggtaagcttatagaaggagctatttatatgtaaatgtaattttatattgtaagacaaaataacttgtcttaaatttgggttttataagatacttaaagggattggttntattctagttaaataatttaaaagaaaccaagttattatgctagtcatttggaattaataactagtcaaagtaggaaatggatatttcctttttttgtttttgttaaactagaatgctagtaagtatgtaataccctgtgtaattatgctagacccataaatactttcatttattttcccatacataaattttatcatttaggcacagagtgagtttatgatataatcagataattgatgcctaaaaatatgcatgttttgcattagtttactattaaaaaactgacttaagggtttgaggataatggaggactagggataaatttttaacctgaatctcagttatcagtatcttgttaatataatttacagtggttcttaccttatacttcattgaattttcccatacataaattttatcgtttaggctacagagtgagtttgtgatataatcagataattgatgcctaaaaatatgcatgttttgcattaatttactattaaactgacttaagggtatgagggtaatggaagactagggataaatttttaacctgaatttcagttatcagtatcttgttaatataatatagattaaataataaaatataatataaaataagatatatcaatatcttgttaatataatttatagtggttcttaccttagttttatgaactcagaatttaaaggggaaaaaagctcctaactatgaaaagtttttaaaaatagtcatggttttaatatattgcacaaattttgttattgtggtgttttgcagcagttatttacattataatttttccgttagtccatcaggatgtacttttgggggaagaaaccctggagccgaaagaagaaaatattgtggcaactgggaacactggttggtgctcctgtcggaatcgctttaatagctggcattgctattcctgcaatgattattggcattcctgtgtatgtgggccgcaaggtaaaatgcatacttcttgttagtccattatcttattctaaatctttaggtgtattcttttagtattgatgatttttgggtttttttttttttttttttagacaaagggtatctttagtttcttcagtataaaacagttactcttttttcataaatttttagtgtttggcaagcatatataaatacgtataaagcagacttgctttaaaatgttctgaatctgaaaattttagtatgtttgtattataaaactttgagtataaaatattgaaggatacacacctgagatttttctcataggtatatccttgtaaggtcaggtctatgagatctttttaatgaaagttaatagctaaataacacatgccctcaggcaaagaataattagccagttcttgaattatttctgctgtagttcaaagctttttttttggattactgcttttaataaatacactattttgcaaattataacaatcttgtgaaagtccaaacaccagtgactaccactggcctctaattgatgaattatatttcattagctaagcaaatagttcttttgttaagggttaatgggataatttatgaggtcctaagaagtctgttgttgcctaaattaatagaatctctggattgagaagtaactttcagtagaatatagctaaaagaaaaaaaaaagaaattttctttggtatccaagaagatcaaaaaaattaaaactttttttaaaaaataaaaagaaattaatcccaaccttgtacccaagcagaacaaaggatagcaattttcaaaaagggaactaacaggccaggtgcggtgcctcacccctgtaatcttagcactttggaaggctgaggctggtggatcatctgaggtcaggagttcaagaccagcctggccaacatggtgaaaccccatctctactaaaaatacagaaaaaattagccaggcatggtggcaggtgcctgtaatcccagactcgggaggctgaagcaggagaatcacttgaacctgggaggtggaggttgcggtgagctgagattgcaccattgcactccatcctaggcaacaagagcaaaactccatctcaaaaaaaaaaaaaaaagaactaacaagctgggcatggtggcttactcctgtcatcgtagcactttgggaggctgaggcagaaggatcacttgaggctgggagttcaagaccagcctggacaacatagtgagaccccatctctcaaaaaaatttaaaaattatctgggtatggtagtatgcacctgtagtcccagctacttgggaggctgaggtgggaggattgcttgagatgggcaagtggaggctgcagtgagctgtgattgtgccacttcactccagcctgggtgatagagcaagatcctatctctaaaataaaaaaaggatctaaaggttgtcatactgtgtcataggtgttgtatgtacttttacttattttaaccctgcagcaacctcgatatttcggtctctgtgtgttaaaatattgagatttaggaaagtttatgtaatatatcttcagttacacacaaagaagcagagctgagatttgaactcagatgcatgaattcttaatataagttccatgattaagtttcagtagctatttgggaactcagtcatggggaaaccaccaactcatgaagcaatccattctgttgtaaaatggctactaattgttacaaaattgttacgtttgagtcagatctgtttccttttgtttcctttatttctgtttctaacttctgggacccgactgggaataaggttgatcttcttctgtaaaacagctgaattttttatattcaacatacattttataatcagaaaaataatatatactatttcttaaaaattagttttggggctgatgacaaacatatttatttgtcacatatttacttctgaaggttttaagtgagtaaacctggactttaaaaaatgttgggccatgtgtggtggctcatgcctgtaatcctaacacttggggagggtgaggagggaggattgcattaatccaggagtttgagaccagcctgggcaacacagtgtgacaccttgtctctacaaaaaactaaataatcagctgggagtggtggtgcatgcctgtagcccccgctattaaggaagctgggatgggaggattgattgagcccgtgaggttgaggctacagtgagctgtgatcgtgccactgcactctagtctgagcgacacagagagaccctatttccaaaaaagagagaaaaaataaaaaatttcaaattatattagctgatcgtaatttttcatgtagttattcaaagcaaggctttgctgaaaacaaaactattcagatacttagaagggaaagagagactgttgtaccacatgtacctataaatcatttatagagaagagattatttacctcattgttcaggtcatagggtacagttacagatctccttttttcaaacatgtacccaaagggttgtaaatgaatgaattagttttccattgaaataatattctgtggtgctttgggatcccaaccagcctaggaaaacctgctgagtcaataaagtacccaaaagctgagccttcacttaacaataaaaagtagagaatgtggcaaaaaatagtaaacagaaaaattaagttgaaccagaaatagtgggataatgtgatcactaatcaaacattggtgcttgaggctgaaaaattttctagaagactcctttctcttggcagcctgcctttgcaagtctgctccatcagttgtgccttttctcttcttcagtgctaagtttcccaggaatgggagtggggaggagcaggaattagctgcagtgctgaaggataatgaaaggtaccttgggaaggtctaccatctctgcctgcatggactgtgtagggaagtgaggaggctcattgacaaggaacctctagtcaatgctgggaaatgggattctgactaggaaatagaaaggtttcttgtcccatacatgcatcacccacctcccaccccaacctttctactgttttccacaacactcatcgtactttacagccttccaaaggccaaaggtgttgttataccatgtaataatagattattttataagtcccatctgtagtattgtttataagtcattttattttagagagtccccatacttttgaggctgttttgaatttgttttggaacagagggggaaaatgtgccatattagcccttgcaaaccatgaaaataaagatctcaaagttcatataatttcacaagccagtttttaatcaccgcttctatgatgatatcaaattctacttattaacacctgtcctgtacagagattgctgagtgaattcagtcctgtcttctggtagccattatttatcatcttttttctttctctgccatttactttgagctataaatgagagccctggaatttgagtcatttgtcaatattgtcttcataaaaaggatctgagaaaaaaataatactgtttattcatacttgtttattagaactgctttttaaggtcaatttttaaaaagaaaccttccctagaagccaatttttaccatttagagaatattctttagaaagaaacctttagaatgctggaagtatcctgttggtgaaccatgtaactcataactgtgttgaaaataataatcttaatttcttcctctttgctcgatacataattacactacttttgattaagattataaagatgacttttactcagaacttttaagcacaaagtaaaatccattaaatcactgtcttaagcaaattaataaggagcaaattatttgtgagaatatataatagtttaaggacactagtaggtttaccttgaactaagatactcagctacgaacttctatgaaaaatcactttagcaagtatagatctttttcaactaagttaaattgtaatgtattttctctttaatcccccacccctatttttattaattcaagattcacaatcgctatgaaggcaaggatgtttcaaagcacaaacggaatttggccatagcaggtggtgtaacgttgtctgtaatcgtgtctccagtagtagctgcagtgactgtaggtaagaaaatgctgaaaagtactaattacctacaattttatggagttaaagttttgtggaaggattttttttaattgttttttaatttgaggacaatttaaattgagcctgcagtaagtcttggttgaaagtattacagattcaagagcctagccttaaagtagttggtaaattgttagtggctgatacccttcctccccactccaccccaagtacagttcagaggcctggcacttcaaaagaaaaaagtttgcatctctctctttttccccttatgtgcattacctgaaaggctgggaaccttgaatttgcttaacaactgggtaaatctacttttggcaaatgttccagccaactcttcagaaccctggcgcttttctctgtatgactctcttgaaaagactttctaaaactcatgtttctgtgagttattttgttgttgttgtttgtaatgactgatttaatttctctttaggtatcggtgttcctattatgttagcttatgtctatggcgtagttccaatttctctttgtcgaagcggaggttgtggagtctcagcaggcaatggaaaaggagttaggattgaatttgatgat

SEQ ID NO: 12731 - DNA, 760 bp, Homo sapiens
ggaaagtttatgtaatatatcttcagttacacacaaagaagcagagctgagatttgaactcagatgcatgaattcttaatataagttccatgattaagtttcagtagctatttgggaactcagtcatggggaaaccaccaactcatgaagcaatccattctgttgtaaaatggctactaattgttacaaaattgttacgtttgagtcagatctgtttccttttgtttcctttatttctgtttctaacttctgggacccgactgggaataaggttgatcttcttctgtaaaacagctgaattttttatattcaacatacattttataatcagaaaaataatatatactatttcttaaaaattagttttggggctgatgacaaacatatttataagtcacatatttatttctgaaggttttaagtgagtaaacctggactttaaaaaatgttgggccatgtgtggtggctcatgcctgtaatcctaacacttggggagggtgaggagggaggattgcattaatccaggagtttgagaccagcctgggcaacacagtgtgacaccttgtctctacaaaaaactaaataatcagctgggagtggtggtgcatgcctgtaccccccgctattaaggaagctgggatgggaggattgattgagcccgtgaggttgaggctacagtgagctgtgatcgtgccactgcactctagtctgagcgacacagagagaccctatttccaaaaaagagagaaaaaataaaaaa

SEQ ID NO: 12732 - DNA, 422 bp, Homo sapiens
cttaaattttattgacagctctgaaaactcccctaaatttccaggcaaaaggaaatgtttagtatttacaaaagacatgcattgataaaacttgattgttgctgctttcaaagcaaactagaaacttctagaaatttttaaattgaaagttttatagaggtaatggtagattcacatgcagttgtaagaaataattcagagatcgtatgtacctttctcactgtttgtctcggtggtgccattttgcacaagttatagaacaatatcagaaccaggatattggcatagacacaatctaccaatctcactcaaatttcctgatttacttctagttatttctgcacagtgtatttagttatatgtattttatcatgtttaagtttgtgtatccaccaccacagtcaagatactgaacagttcca

SEQ ID NO: 12733 - DNA, 422 bp, Homo sapiens; identical to SEQ ID NO: 12732

SEQ ID NO: 12734 - DNA, 189 bp, Homo sapiens
acatgatgaaaccccatctctactaaaaatacagaaaaaattagccaggcatggtggcaggtgcctgtaatcccagactcgggaggctgaagcaggagaatcacttgaacctgggaggtggaggttgcggtgagctgaaattgcaccattgcactccatcctaggcaacaagagcaaaactccatctca

SEQ ID NO: 12735 - DNA, 6784 bp, Homo sapiens
ttaatcccccacccctatttttattaattcaagattcacaatcgctatgaaggcaaggatgtttcaaagcacaaacggaatttggccatagcaggtggtgtaacgttgtctgtaatcgtgtctccagtagtagctgcagtgactgtaggtaagaaaatgctgaaaagtactaattacctacaattttatggagttaaagttttgtggaaggattttttttaattgttttttaatttgaggacaatttaaattgagcctgcagtaagtcttggttgaaagtattacagattcaagagcctagccttaaagtagttggtaaattgttagtggctgatacccttcctccccactccaccccaagtacagttcggaggcctggcacttcaaaagaaaaaagtttgcatctctctctttttccccttatgtgcattacctgaaaggctgggaaccttgaatttgcttaacaactgggtaaatctacttttggcaaatgttccagccaactcttcagaaccctggcgcttttctctgtatgactctcttgaaaagactttctaaaactcatgtttctgtgagttattttgttgttgttgtttgtaatgactgatttaatttctctttaggtatcggtgttcctattatgttagcttatgtctatggcgtagttccaatttctctttgtcgaagcggaggttgtggagtctcagcaggcaatggaaaaggagttaggattgaatttgatgatgaaaatgatataaatgttggtggaactaacacagctgtaggtaagtcctttaagcaaaggaagaaaatgtgcttattaacagtgtaagtagtggggaggccagagataacatgcaactcagaatttccattgccatccttttactaggcctaatagtattcattcagaagtacataagtgaataaactgccaaggaggagtgtatggatgaaagaggtgggggtaattctgggtatctgacctctaattggaatataatgtcttagaaatcataaacttttcatcttaaattttgcctgaaacattataaataactaagtaaaggatatgaagaggaatacagttaataaaagaaatacggatgaccaataatacaaaaatatcttcaactcaatgttattcaaagaaatgtgaattagaacagtaacgagcaaagattaagaagaataaaaaagccttcatagactgcctataggagtatgtcaataaaccttttttaaaaagtgcatgttctatattctagcaattcttgttttagaaatttgtcatagggaaataattaggcagatgtgtaaagataatgcctactttcttacctcttattttctcttgaactggcctcaatcagatttttgtccctaccactccagaattttatttctgctattcactgaagcagagtcaccagtggcctccacgtaacctaatacagtggtcaggtcttggtcctcatcttaacagtatatccgacatggtagagactctacccttcttgaaatacttcacttttcttatgggaaaccacttcttaccatatttcctggccagtccgtctcattaatctttgctggttcattttcctcttctgacctctaaatgtttgttccccagagctcagttctcagaattcttatgtatctacacttttcccctaatctcatctattaaataatgcatagaccgacctctcccctgaacttcaaacttgcatgtgtaactttcctctttaatctgcacttgagtgtctaacaagaatttcaagcttaacttgtctacagccaaattcttggctctaaaatctcttcttcccttcatcctccttaactcaataagtagcttctccattcctcctgttgcttgggccaaaaaccttcacttaacaatgcctccctcttttccctcttgtcctacatctgattgatctgtcagcaaattctgctgcttccttcaatatttagccataatccagccacttcttactctcttcgttgtccttcccttagtccaagctaccatcctctttcctgggctattgtaatagcctcttaactgctgtatcaacttctcagcttctattcactagtccatagtgcagccatagtcacatgtctaaaccctgtcagattataactttcttatgctcaaaacttccccagtggcttctaactgtactggggaagaaaatccaaagtccttatcatagcccaaaaggccccacatgatctgccccaactatgtctctgagctcatctcttgtcaccctcttattttataccactcttgcttgatttttgagggtgccaagcattatcctacttctaagcttttaaactggcagttctctgtctggaatactctttccctagaaaatttcatgactcactgttttacttcatttgtctctacaagtattaccttatcaaagaggccttctgtcatcacatcatataaaatggctcacagacatgtacgtacatgcacttttcatcactctcctcccctttactctcttgtatttttcctcatagcatttgtcaccgtgtgattgggtatataataggaactcaaatattggtgcaaataagtgactccttaatacaaaatgtgtgagaggtactgtaaaattggaacatagtgttatcagatcttaataatagcttgtagacagaactgtggcatatatctagaaatcaacttttagcctattcttactgacctagagaataataagctctttaaatgacacccttaatgaaaactgtcacataattttcctctaaagtcagcgatattttttaacaatcatattctttatagaattcctaaatctgggtttttgaaaaaagaaactagtgaccatttaaaattgttggctctattcccactgcttctagtggactagcctgaaaaaaatatttttccatgtctgcgtatattttataccttatataatgtcctctctgaaatcatggaggaatttaagaaggagaaaattgataatcatacttacttagtttctttggaatatttgcatttagacacaacatcagtagcagaagcaagacacaacccaagcataggggagggaagtgttggtgggctgactggcagtttgagtgcaagtggaagccacatggatcgaataggagccatccgagacaacctgagtgaaacggccagcaccatggcactagctggagccagtataacggggagtctgtcaggaagtgccatggtaaactgttttaacaggtgtgtgttttggtttggtttggttctgctttctggtaactacaaattattaattaggtgagaattttgaacataaagcatgatgattatatataaccctactatgtcaaggttcaaaatagtaatgttaaaaatgaaatttggggccaggtgcagtggctcacgcctgtaatcccagcatgttgggaagccaaagcaggtggattgcctgagctcaggagttcgagaccagcctgggcaacatggcgaaaccccatctctactaaaaaaatataaaaaattagccggatttggtggcatgcacctgtagtcccagctggtcgggaggctgaggtaggaggatcacttgagcctgggagttggaggctgcagtcagccaagatcacaccactgagctccaacctgagtgacagtgagaccctgtctcaaaaaaaaaaagaaaaatttggtggtagatttctaagtctaaggaataacattctgccaattttttcactgtccttgtcacattttatattataaatcgttgctacagctgcttcagtagacattgaagcaaaggcagtacttaagcctagatcttacctctgtgggtaacaacagccagatattaggagatgggactttggctgagtcctgggaaacaggtggagtcaggacatccaggaatgtgtgaactgggaccgggataatcggctagggtccttttatgtattaatgcttgcttactttgttctcaccaagtcttttatcaatagccatatagataagtaggaaaaattatcttcccctgtttctctttaattcactatttttcacttaggcttattagccttgctttttttaagtgtaggggagaatacatgaattaaaagataaattagacatcttatttttaggtagtttgccttttaaatacaaactcttaagttatagtggtatatactacctctttttaaaaaggcaaatgttggttgggctcagtggctcatacctataatcccagcactttgggaggccaggttgggaggatagcttgaggccaggaatttgagaccagcctgggcaacataacgagaccctgtctctaaaaatatatataaataaataaagtattaaaaggcaggtgttatttatagagtcattttttaatatagatgcccaggatttttggattcattggtgtgtcatgtttaatgattaataatgtattctaactttgtgttttgcattgaaacattacaaagtgccatatgctgagtgagaataatggagtacatttaagtgaaaatcctttgtgtcttttttgtgttatttcattaccactttacttggcagacagctgatgttccccattttatttggatggctggtactatgcagtgtgctgcagtagaatttaaattaaataaaaggaaataaaaaataatggttcctaaaatagcttctggttactagggttcttaactgaattatttaaagatacatattacagtagtgctgatattaaatataattttggtgatttcatacccccctttaaggttggaagtacaagcagatgtacagaaagaacggtacagtctaagtggagaatctggcacagtcagcttgggaacagttagtgataatgccagcaccaaagcaatggcaggatccattctgaattcctacatcccattggacaagtaaggaaaaaactgttaaaaaattgaaagtattttttaaattaaaggaataattcctatcattagacaaattaccagtgaaaagtggctaccaactattaagttctctgagaaaaggaaacagtgagctgtccagagtaggcaaatctgtatagatcataaagtggatttgtggttgtcaagggctgggaaagggaagaatggtaactaactgctaatggatgcaagatccctttttgggatcatgaaaatgttctgaaattaggtagtggtgatggttgcacagctctgatcacaactaaaaatcactgaattgtacactttaaacaggggaattgtatctgaataaagctgttctttaaaaaaaggtagcatagtgtctagaacagcataagcaataaatgtgtccaccactattttaaaacattgaagcattataaagagttctgttatatcaagtatgttttttaagtagaacgtgttctgcgttaaggtgttctcatagcttatatatagtctgaattttccacatagaaacccttcccccagtcatctgaacaaaaagaagtcagcaattatgtttgtatttgttactcttatatttcagagaaggcaacagtatggaggtgcaagtagatattgagtcaaagccatccaaattcaggcacaacagtggaagcagtagtgtggatgatggcagtgccacccgaagtcatgctggcggttcatccagtggcttgcctgaaggtaaatctagtgccaccaagtggtccaaagaagcaacagcagggaaaaaatcaaaaagtggtaaactgaggaaaaagggtaacatgaagataaatgagacgagagaggacatggatgcacagttgttagaacaacaaagcacgaactcaagtgaatttgaggctccatccctcagtgacagtatgccttctgtagcagattctcactctagtcatttttctgaatttagttgttctgacctagaaagcatgaaaacttcttgtagtcatggttccagtgattatcacacccgctttgctactgttaacattcttcctgaggtagaaaatgaccgtctggaaaattccccacatcagtgtagcatttctgtggttacccaaactgcttcctgttcagaagtttcacagttgaatcatattgctgaagaacatggtaacaatggaataaaacctaatgttgatttatattttggcgatgcactaaaagaaacaaataacaaccactcacatcagacaatggaattaaaagttgcaattcagactgaaatttaggcccataaatgctgcagaataattaccactgtacaaccgtgtttggagctggttgaactacatgtgactacttaagtttcaggttaccagcaaaagccgggtttcattatcataatgcagatacattttctgtgttcagcaaggcattgtgtgtcatgtggatcttagttaccaaactatgaagtgaaggctttaaaagtgcattattttaaggataataaatttgaagagcaaagcatgttttgtgtgtttgccacaaaacattgcttgaagcacatacttagatagaaattggtcttaatttatataatcaatataaaatactaatgcaattctacagcattcaaatgaagaaaacttgaggctttagggataagtggttagtgatattttattgaaaccactaaagagataagtttaaaagaactgcataggttactctcagtatatgatactctgtaacatttctatttatatcggcataaatttcattttttttcttcatatgcaatgtggttgta

SEQ ID NO: 12736 - DNA, 10008 bp, Homo sapiens
ggcctgtcctggcctctgagagtgggatggttggtgctgtacctcaggggacagggcggggcgggaggaggcggggccaggcctggtctctgataacgggatgggtggtgctggacctcgggcggggccgggcctcgtggcgggaggaggcagggcagggcctctgggacggggctggacggcttgttgacggaaacgagcccttgacgctgtggcccggaagtggagcggctgtcgcagtgcggctccggcagtggcagcggaggcctgtgtttgcggccttcggcaagcgactgagatggcgagcgcaactgcacctgcagccgcagtccccaccctggcttcgcctttggagcagctccggcacttggcggaggagctgcggttgctcctgcctcgagtgcggggtgagctgacggagttagaacgggcgacggcaggggcgggctcggggtcggggagaggccgggctcggggtcggggagaggccgggctcggggtcgcggagagggcgggctggggcggcggcggggagccgggcttgggcgagggaggtggctccgcttacctcagcttttccattcgccaccgttcggcccccacacgccacacccacaagtcggcgaagcccaggagaccaccgaggagtttaatcgagagatgttctggagaagactcagtgagtgcgcctccttccgggctccccttgcctcacttcctccagcgtcccgaccccttttcctcccgctgtcccccacggaggggactgctctcccccgctgcatcctttctgtgaggtaccttacccacctcagcacctgagagggtgaaatagaattctaacctcgacattcgggaagtgtttttgagaagtctcggtcggtaagggaagtcttccaagtccgtgcagcactaacgtattggcacctgcctcctcttcggccaccccccagatgaggcagctgtgactgtgtcaagggaagccacgactctgaccatagtcttctctcagcttccactgccgtctccacaggtgggcttcactttcgtggaatccttgggctgccgagttacaccttaggaatcctctaattttctttccaccttttgcatgcacgccaggagatttcttttcttcatctgtccagtgaggttaccgtttttacttcacaggattgttgtgaagaccgaattgccaagtgcagttcctggcgcggagtaggcaggtcttataaatattggttcagtctgaagtttatcctggttgtttcccttctgataattttttaagcactttttatttgctgggtgttttcacatacttgatggccatctgacagatgagcaaggaggctcagaagctcagcttaagatttaaaaaaaagcaggggggctagagtttaaatcaaggtctatctgatgtctaagctacctattctgttatactgcataataccctttttatattattttttatatttaatcagtaacatatgtagatagtacaaaattcaacagatatcaaagtgtgttaagtttacctttccacccactttctcatttttgtctcccccagttccttttgcattattccacgtatattctgtgcatatatacattcatatacatttatctgtatgtgtcagcttctttttacacaaatgatacataaacactgttctggaccttccaacttagaattactgcaaacagtgtcgtgatgaattacctaattctgtgtatgtgtgtatattggtagaaaaaattcccggaagtagaattgctagaacaaagatttatgcattttaaatattcctttattataaaactaatgaaagtaaacatgttggctatgaccacgtatgctctatgctcagtttttctagagttgtgtatgcttaatataggagtaagattcttttaaaatggcatattcattgccttatttgattttcatagtcaattgttttaatttttcagtctacatatataggtgtttggaaaggatataaatatcttctgctgcatgtacctacagtgataaactctctcctcctacatacctttgagattttttttttttttttgagacagagtctctctctgtcactcaggctggagtgcagtggcacagtctgggctcactgcatcctctgcctaccgggttcaagcagttctcctgcctcagcctctcgagtagctgggattacaggcacctgtcaccacgcctggctaatttttgtatttttagttgagacggggtttcaccatgttgggcaggctagtctcgaactcctgacctcaagtgatccgcctgccttggcctcccacagtgttgggattacaggtgtgagccaccgtgcctggcctacctttgagatttgtgatgaggaaacaagagatgaattgtatgagagcacttcaaaagattcatggaaaatacttatttcaaaaagagtagttaatattaccttatttttcttatctgctaacccctttctttcaaatgcacttaggacttgctgctaaaactcactgcaagtaagataccacaaggaggcagcatagaactgattttctatacatgctcaggacagtagtttcactcatagatgaaaagttagaatttggatttatttgaaatatatacaaatattcaagtatatacatatattcaaataaatacatatatgtatatatgtgtgtatatacacacatacatacacatgaatcatcattgccttcttgagatctcaccactttagtcctactaaaagatgggtggttgttggtttttttttgttgttgttgttgttttttaaattccaatctgtatggaatgatactttaataaaattatgtgctcggatgttgaataaatgtcaaattgccataaaagtttctaaacactctcagtcactgcttatctcatccctgactggtcacaaacagtttgtagactggctccaacctggaccacatttgtatagtattgacttagaatttaacagaaaattgaggacaaggaagatgagaaagccagtgaccacctagaaggaaaatagttaacatggagcattgtcgagtccatgctagttacctttagttacatattctgattctgttaaaaaaagagagagacctggttaatggtttaataaccatggtctgtcagttggtctgtctgtctctctccctccctctcttttctgtaaagggccagttagtaaatattttagattttgtaaccaactacccaactctgcccttatagagcaaacacaactacagacattaaaaccagtgagtatggctgtgtcccaatacacttcatttccaaaaacaggcagtggggcctgacttggcctgaggaccacagtttgccagctcctggtctaagatatcatgaatatcttgggatacagagtatcaggaataagttttttcctgctgtttcttaatggtttattgagttgtcagcccaatatctactatatagctaactcctccctggtatgtgatgagtatagtaggcctgccttcataccaggacttcagaaaatgtttgatgatgctgtagaaatatctgccctaggccgggtgcagtggcttacacctgtaatctcagcactttgggaggccaagggaggtggatcacctgaggtcaggagttcgagaccagtgtggccagtgtggcaaaaccccatctctactaaaaatacaaaaaattagctgggtgtggtggcgggtgcctgtaatcccagctacttgggaggctgaggcaggagaactgcttgaacctgggaggtggaggttgcagtgagccaagattgcgccattgcactccagcctgggtgacagagtgagactctgtctcaaaaaaaaaaaaaaaaaaaaaaaaaagaaagaaaaagaaagaaaagaaaaagaaaagaaatatctgctctattccacagcagaagggttgaccactttgatctaatctgtttcctttttcataggaaacccagaagttctgtgaacaagtccatgctgccatcaaggcatttattgcagtgtactatttgcttccaaaggatcagggtaagccacataagtgttgcatttatcgtgtagatctttgctaatattgtggattatgtcttgtgacttttacctttacccaacttgaacatgtaactttctcccataaaatacagtgaaggataattttgtaatgtaagtgacttatataaacaagccattattctaagatacagatgctttgttcctatgacttcccatctcccctgccttgcctgactcataaggcttttaattctcacagccttctccctcttcaacccgttttaacaccacagatactggctggctctcagccccatatgcaggctcaggccatccttactttcctccacccatgttatatctcaccctatttctgaacatctgcataggttaaatggcctccagccctgcctgtagaatcatgcattgattataatcatgccaaaattataactgaatacatgtcatggatcttcagggttactcaagtggcttaaacttcaagtgtttcatctacagttgttaagagatcacggtccttaatgaatgaatacatggtgtcacggaaagattttgttccaaatctcttttgaagaaaacactaaggaatggcaggaggggcaagaaaatgccatggggatataagtaagacctgagttttgtgttagcatgtaggttaaagcatgtgggtgtacattaccttatagttctgtaatgcttagactcaggaaagcagatggtgcttctgaaaagaacaccaggttgcttattctttgggtttggccacagggatcaccctgagaaagctggtacggggcgccaccctggacatcgtggatggcatggctcagctcatggaagtactttccgtcactccaactcagaggtagtgatgccacagtttaggttaccagttattggggttccttgcctcagaggggaaaagctcattttaacagcaaagttactgacagctgagagtaatgaccagcaggaagaagctttttaggagacaggaacctaggttattaatatatccttactgatttctttccccagccctgagaacaatgaccttatttcctacaacagtgtctgggttgcgtgccagcagatgcctcagataccaagaggtgagtgaaagtgggcagtgggccatgtctgctggccaaagcaaagagacctcatgtctagcttccagctttgtaacatgtatttgaatttatataaacagtctagtgaaatatatatattttattaatgaaattaataggtaggtattaatactttttgtcattctctagttatcatacttctaaattccactcccccttgctgtggctgtctcttgttgaacaagtatggtttgttttcctagtcctaccccaagagtagtattatggagcacactgaagcagttatgaggtagagacagctaggccaaaacagtggttgtccaagaggaccatgatgataaacatcatgtgaccattttatttcttcttgtgaataaaatacaagctttttaaacccctatctagataccaggggatgtagtgagaattttttattaaacccgcacccttgtcaaccgtccttggcactcccatcaataggaacaatgtgattgttccttgcagtcataagaaaattgttggatttctcctctaattctagtgcttctgatttttcactcatagataacaaagctgcagctcttttgatgctgaccaagaatgtggattttgtgaaggatgcacatgaagaaatggagcaggtgaggggacctccatcattggaaggcaactccttgactagtagatgagaattaattataaagagagatttcctgagcattgaccagataggtcccattctcactactgtcctctgtcttccatctcccactgcttgttagtgtttgatttagtaccactcctctgtgttcccttactggacaaggagagcgagaacagggtttatgaagtgattcaactctgtagcccttagtgaagtggctggctaagatttttggacaactaagacatcgtggtaaaagtataataataggcctcgccttttttttttttttttttttttgcattcacatacatcatggtatgtcttaggctgtggaagaatgtgacccttactctggcctcttgaatgatactgaggagaacaactctgacaaccacaatcatgaggatgatgtgttggggtttcccagcaatcaggacttgtattggtcagaggacgatcaagagctcataatcccatgccttgcgctggtgagagcatccaaagcctgcctgaagaaaattcggatgttagtggcagagaatgggaagaaggatcaggtggcacagctggatgacattgtggatatttctgatgaaatcagccctaggtaagcgggatccccacttgaaacatctgagcagcagcgttctgatttcaatttgtgttgtcacctcaaggttttcacagtttttttatattttgaaatttttcaaacctataggaaagtttaaaaagtaccttcagtgaacacccctatatccttctattagatttgcctgttgttcacattttttcctatattggtttatttctcaagagatactgtttcatatttattccagaatgttttgagagtaaattgcagacagcaatgacatttcacccctaaatacttcagtatgtatctcctgaagtactcttattcctactcttattatcacatccaagaaatttgacattgaatataatagtattatctaatattcagatttccccagttgtctgtatctaaaatgtcatataaattcagggttctgtcaaggtcccacattgcatttaattgtcatctctttagtctcttgaaatctagaacagttcctatcctttgtagtcttttttaatcaacattttaaaaagaaaccaggacagttgtcttgtaaaatatccaacaacctggattcacgtgattgttagttctcatttttgcaagaatatcatataattaagtgttttgtacatctcattttatcatattagggaggcacatgatgttggtttgcctcattattggtggtactaaatttgatcacttaaagtggtgctcactttagtaaaggtatattttactctaattttagcttccactgatgaaggctgcctgcctatattagttattaaactgatggtttcacatcctcacatttttgactgaattgatcatgcaccctactatgaaccaagggaatttcccccccagcttcctagtgaaatggggtatggttgtttcaataaagactggttgaactcattctgtattggttgcccagttgcccaattttaaaaactgacaggcatttctgggacagtttctcactgttgacatccatagttgtgtactagaaacaacctggctgcgtttttttgttaatgattacttttgttttctgctcttagtgtggatgatttggctctgagcatatatccacctatgtgtcacctgaccgtgcgaatcaatgtaagtactggctttgagggaatagctacagaacaaatgggcagaatttcactaatcactagtatttcctgtaagctatagggtacatatttattagtcacatttggatggaagtacaacagtaatgtcacagttcttgcatgcgtttggggttgataaatattcactgaagttgaattataatagccatgagctttggtagttctctcttccataatcacctgggtaatcattcagaaaagcccaaaggccttagaaaatgatgctttaaggctgggcgcggtagctcacacctgtaatcccagcactccaggaggcggaggtcaggagttgagaccagcctggccaacatggcgaaaccttgtctctactaagaatacaaaaattagccgggcatcatgcacctataatcccagctacttggaaggcttaagcaggagaatcgcttgaagccgggaagtggaggttgcagtgagccgacatcgcgccactgcactccagcctgagcaacagagcaagactctgtctcaaaaaaaaaaaaaaaaaaaaaaaaaaaaaaaaagcttctttgaaaagaaagtcttaattacacggtaatttaggaacttctcaacttgaagtcacaagtttctaatttctagactaggcagcaattagattgaacttcagctgttcatgaagtagctggctgaggtcacatgtttctgatttctagacaaggcagaaataagtgttccagaaacatactctgttctaatacaaacacattgtgtgatttaactatggagagtcaactttcttataaaaatctgattttattgtattctttgaggttctgtgccctttactagagagagttctgttctctctaatgttattggaaagagcagtaaaactgccaaatggcttatattttacaattgaatgtatcaattctagtaatatttgataaattggataatggaaattagattcatcagatgtgtcttcatgatgtataaacaccttgaagtagaataggatccttttgggcattaacatttttttggcattaacttttaaaaaattgacttcctaagaaataaacatttttagcaatatgcctagtcagctatcccaaacatagtatctgctctagcaattttaaaatgtgtactgcatatgcatcttatatgtattgatattttatattaaacgtctccatcttatccttatattggtgttcttaaaattcttaatgcgctttttttttttttttttttttttttttttttaaaggaaccttagtcatttctgctttatattttgagctatcagcatttgggaccaattcaggttacattttcctttttctgtccttttttaaattgaaaatattttagatctaaaaaatcttattaaaatgttatagcaatagtattaataagatcttgctaaatagaaaagaacccgtaatcctgccaccctaacctaatcagcattttaaattttgcatacttccttcaggtcctttttctaaataatttttttattacttgggtctttaaaaatatttgaactcacctttttatggtagggctcagggtgaataacttctgtgtttcttttctagtctgcgaaacttgtatctgttttaaagaaggcacttgaaattacaaagtaagtatgaagacttctcagatagctttttgtgagtaaaacggaactgctgtccagacgttctcaactccctagctcccatttcaaggagtgggaaagggtgggtgtgggattttctttcagcttcagttgtggggcagctgagattctgcaaagaagcttccctttaaaaaaattttagttttccctgtgctccctcctgaggataggttttcccttgacatcctaataagtttaacttacttctttcctattctattcacagagcaagtcatgtgacccctcagccagaagatagttggatccctttacttattaatgccattgatcattgcatgaatagaatcaaggagctcactcagagtgaacttgaattatgacttttcaggctcatttgtactctcttcccctctcatcgtcatggtcaggctctgatacctgcttttaaaatggagctagaatgcttgctggattgaaagggagtgcctatctatatttagcaagagacactattaccaaagattgttggttaggccagattgacacctatttataaaccatatgcgtatatttttctgtgctatatatgaaaaataattgcatgatttctcattcctgagtcatttctcagagattcctaggaaagctgccttattctctttttgcagtaaagtatgttgttttcattgtaaagatgttgatggtctcaataaaatgctaacttgccagtgattaaatgagtg

SEQ ID NO: 12737 - DNA, 10008 bp, Homo sapiens; identical to SEQ ID NO: 12736

SEQ ID NO: 12738 - DNA, 4636 bp, Homo sapiens
caagacaaaatgacaataataataataataatacctagaaactcacacactgagaatggggcagtaaataataatagggaggatagaaaagtcagcatggcattccagatgagaaaactgaagcaagttaaactttctacatggtaaccgtgattatgtagttgatatacaaagtaatgactgtgggccttcaagaagaggttaaaatacattcattatattaacgagtgcatcttagaaagatttctttcaaaaagtagttgaagtttttttgctttaaggagtaaatctcaatcatctggaaatttaacttctgtggaatacctctttacatcttaaaggaaatgttaatgcattatattgaggttattattgcaatggaattttcaaaaatgtgagtgtgctttttttgtttctagaatctataagacacatatctgttctaggtatagtgtctactaagacaatttcacaatccaaaaaatagttggttagcaaggatatcaagtacaacacagagactagcaaagagggaaggctatgaaataaaatgcttatagatggctagtctcatatctctgctttattcctataaatgtatctcatgatatatgtaatcagaattatagttatttaatctcctccttttttgtccattgcctcttttaggtccatggttttttggtgaaatcattgatggcaaatttggttgctgcttttcctttgggatatttgttaatggacatttcctacaaggcagcataacatttataattggaattctccaggtaagaagtcagaaaagcaatttaagaacatcttggacttgtcagactaattgcataacagttatgaattaaatccaaaatccagaattaagtaccatagatcatctttcctactttacttgcagggcagtctttaataaaagcttcatttgcttttaaagtgcttcctaaactccttccaccactctcatgtaaacatctaaaatacatttttttttccccaagacagtgttctgctgtcgcccaggctgaagcacagtggtgcaatcttggctcactgcagcctccacctcttgggttccagcgattttcctgcctcagcctcctgggtagctgggattacaggcatgtgccaccatgcctggctaatttttgcacttttagtagagacagggtttcaccatgttgggcaggctggtctcgaactcctgacctcagatgattcacctgccttggcctccgaaagtgctaggattataggcgtgagccaccatgcctagcctaaaatacatttttgtcatgaagtgtttataagaggtgaaagaagtttttgttgtttttgtttcactgtgctttttcattgacaaaaaaatgaaacaagggattatggtagaaaaagttttagatttctgagtaaaccaaaactgattatgatgatgaagaaggaaaatattttagagggaggaaactaaaaaatagacacattaaaaaaatgggtcagttattcagtggaaactgcattattcaaaaaccagacctgggctttcctagcaatgtacttgtttaggaaacaaactgatgtattaggtttacatttgattcctttaaaataaacacacaaagaaccttgatccatagaaaaactacataaacagatttgaaaagtatttatctaacagtttctttattttactcacctaatggagttagtggaccaaaatttgaagttttggaagagatccaaaaacattcaaaataagttcatggccttctaacagggcagtagaacatgatccaacaggattagagacagccaagtaggaaagacttctgcctagcaaacactgacccaagtccagaatattctctgcatagcagcattatatacatgagtaggtcctgggttcatttcagttttcttttcttttcttttctttctttttttttttttgagatggagtctcgatcttgtcgtccaggctggagtgcaatggcatcgtctcggctcactgcaacctctgcctccctaattcaagtgattctcctgcctcagcctcccatgtagctggggttacaggtgcctgccaccatgcccggctaatttttgtatttttagtagagacagggtttcactgtgttggccaggatggtctcgaactcctgacctcaggtgatccgcccgtctcggcctcccaaagtgctgggattacaggcgtgagccactgcacccagcctcattgcagttttctattatgttgatggaggctgtctctaaggagctctctcataccaaatgaatcctgagccttaccaaaaggcagggttttttcctttgtaaatgtttacattcatattctaataaatagtacactaataatggattttatgtatcatccagacccatgaatcccaaatctatatctctgatctagacctcttctctgcacttcaagtgcctctatatccaatggccacagatgtctaacaggcatctcaacttcatgtgatgtctctctgataggaacattatttccaccccaaacctgttcctctctgtttttccagttttaataaatgactccaccattcacctgatttctccaagatgtatcctcaattattccctttccttcataccctgtatctatttcaccagcaagctctaccttatttgatctgcttccaatgcatatcttgaatccatccacttctctccatttctgttttcctaatctaagttgtaattatttcttgcctgggtcttctccctgatattcttgcctccttactctcagcttaatacagagcatccagtgtgctcttttaaaaactttacaatcagctcacttacttttcagcttgaaatgctttgaagcagagcagtgatctgggtcctgccgactgccccaatttccacctggctcatgctctgcatgcacttccttaaagaggccaagacctctcccacctctgggcttttcatttgttccttctgcctagaatgcacttccctccgctgattcattcttgtccttctggcctctgagagcctttctcccagttaccttctcatgacccagttctttccttcattgaactaatcacgatctgtaattatattttttggtttttttttttgtctgtcttctccctgttagaatgtaagctctatgacggaccttttctaacttgtttgccattgtgtccccaacttggagcctagctcatgcctgctacataatgggtgctcaataaatatttgttaaatgaatgaatcatacagcagctcaacttggattataatttagatactctaatttatattccagtacttatcatgctacctcaaacaaaaatggaggtaagaaaaaaaatactgatagccaagtcctcccctcactccaccaaaaaagaggggttgttgtatgtgtgtgtatacatttactcagttcaattccagcttaacaccattgggtattaactgtgtatatgatactgtactacaagttgggacttcagcataaattaaatgatacctgcctctaagatgaataaaaggacatgggcaaatacacaactagccacaagtcagctgttgtgttataagcaactgtgcttgaagtaaattagctaacgccaagacagatagcagcatagtcttaggatccactaataatgcattattaagaccaaactcttccaaggacttgggagtaagctatggttctgttcttttccagctggcgttttttaacatccccttgatggcttacatgtgttggagcttgctgcagcggtgctttggtcacaacttcaggtctcatctccatcaaagaaaatacttgaaaattatgcctgttcacctacttatgctactgctgtacatctggcaggtttattcctgctactttctttatgcaacatacggcaccctagcttttttattctcccctttgcggacctggttgacactgctgacacctgttctcattcgttatgtgtggacactgaactccaccaagtttggaatcttcatggtgcagttaaaaagccacctgagctcctgaaggccatgtctcaccactggcagctgggcagaagcccagcctctgtgtctgtagcccaggcctctaccccagtagcaggtggagggccaggattggtgggtgagctttagggagcagctgctcgtttggagtcctggacgttggagggattacccactactgatacctgcagaatggactgcagaaaagtctcaaaaataatgcctttattccttccctccctaaggaggcaaagagttgatttacctttgtgaagagaaaacccttatctaggacatccacagggtagaggttgggtgtgtgtacgggagtgtctgaggcccagtgtgttttttagggttaccccatgtaaagcacttaccgctgtgcttggaattcagcagctgtcaaaggtgcaatttcaggggcagggaacctttgaggatctgggcccgaccctcactacccctgagatattagttcccaggcctgttttcccacaggattgtgggctctctgcttccttagtcggaagtgttttcaactaatcaaataaatgaatgaatgatgaataagaaagac

SEQ ID NO: 12739 - DNA, 567 bp, Homo sapiens
tccttttgtaggtgtaattcataacatatgcctttctgctgtctttaggtataatcagcaacagcagtcattctttgagtgactaatgtatacttggggttggggttgaaattccttaagccaaatgagttttagcttactgttttgaagtgccattttgtattgttaacaagtgtcatgaagggaaggaactaaaatcaaactgacagagtgtcaaggcaacaaaataacataaacaaaataataacattgtacaacagtctagttcttttatcctttcatatagagcctattttttatatacttttatatttctctactggaccaaattcatgttattaacatcagactttaattgtgggatacttaatgaatatagaactctaatataaagacttacctctagctgaattattctctcaggtcctgtattgtataacttcgttcagtcatgtttggatctttaaggataatgatcagggaaagcactgatcaatgtaattttttttttttttttttttttttgagatggagtcttgctctgtcccccaagctggagtgcagtgg

SEQ ID NO: 12740 - DNA, 4636 bp, Homo sapiens; identical to SEQ ID NO: 12738

SEQ ID NO: 12741 - DNA, 567 bp, Homo sapiens; identical to SEQ ID NO: 12739

SEQ ID NO: 12742 - DNA, 7784 bp, Homo sapiens
accacaagtcctgaagagaaaagaaaaatcattggggatacttttgttaaggtacctttgtttttaatatcctcaacatgtactatttttgatgtgaatcttagtatttgtttttccttgtcactatatcaaataaccaaattagctaattttaatcctttttcttatgtggctgagagttttattgtatattgtcattatattgaccagtagaaactgttttatgtttttttgttgttgtttggttttttttttgtttttttgagacagagtcttgctgtgtcaccaggctgggctggagtgcagttgcacgatctcggctcgctgcaacctctgccttctgggttcaagtgattctcctgcctcagcctcctaagtagctgggactacaggggtgcaccatcatgcccagctaatttttgtacttttagtagagacgggggtttcaccatgttggccaggttggtccggatctcctgacctcatgatccgcccgcctcagcctcccgaacttctgggattacaggtgtgagccactatgcccagccaactgttttatgttttaataaacatgtttgcctacattgccaggctattattttaagaatagatgtctttaagagtagatgtattcagcttatcatagactttaattcattgattatctcaatggctaatttcaagctcttgaatggaatgttcacatacctttgtttttgtttttttttttttttggaggcggagttttgttcttgtcactcaggctggagtacaatggagcgatcttggctcacggcaactttcacctgctgggttcaagcgattctcctgcctcagcctcccgagtagctgggattacaggcatgcaccaccatgcccagctaatttttttctttttttgagatggagtctcactctgccgcccaggctggagtgtagtggtgcaatcttggctcactgcaaactttgcctccagggttcaagcgattctcctgcctcaacttcctgagtagctgggattacaggcgtgtgccaccatgcccggctagtttttgtatttttagtagagacggggtttcaccatgttagtcaggctggtctcaaactcctgaccttgtgatctgcctgccttgcctcccaaagtgctgggattacaggcgtgagccaccacacctggccactaattttgtatatttagtagagatggtgtttcatcatgttggccaggctggtctcgaactcctggcctcaagtgatccaccccactcagcctcccaaagtgctgggattacaggcgtgagccactgtgtttggcctcatgtacctttttgaatcgtgttagaggacatgttcattaaggagtttattttggagattggtggattttattttctgatcagtatttctaaaggactctaagagatttagctgaaagtataaacttttgcttttaaaaaaagttatctcttacaaggctgttttactcctgttgattatagattgccaatgaagtaattggagaaatgaacttgaaaccagaggaggttttccttgcccaaggtactttacggcctgatctaattgaaagtgcatcccttgttgcaagtggcaaagctgaactcatcaaaacccatcacaatgacacagagctcatcagaaagttgagagaggaggtaaaagtttatgaaaactttttcataaagtagatacatggaaagtcttccattcttccctcctcttccctctaatattcacagaattgcataaccatcaccacatctaattttagaacattttccttaccctaaaaaggaaccttatacccattagcagtcactcctcgttctacctgttgttgtcattgtcatcctgcccccaccccccagctcctcctttcctcctttcttgccagccctaggcaattaccaaccactaatttattttctgtctctatagatttgcttattttgggcattttatataaatggaatggtacaatatgtggtcttttatgactggcttcttttacttaccgtaatgttttcaaggttcatccatgttgctgcatgtatcagaactttattcctatttattgccagataatattccatcttatgggtataatgcattgtatttatcctttgatcagctgatgggcttttgggttatttccactttttggctgttataagtaatgccgccatgaatactggtcataagtttttgtggatatgtgtttttatttcttttggtatatgcctgggagtagaattgctaggtcttaaggtttaacattttgatgaattgccaaactattatttaaaatgatgatacaattttacattcgcactagcaatctatgagattcaaatttttccacatcctcaccaagacttgttgttatctcttttcttattgtaaaaaacacataacataaagcttaccatcttaactctgatttttttttttttttgagacagagtctcactctattgcccaagctggagagcagtcatgcgacctcggctcactgcaacctctgcctcccggttcaagagattctgctgcctcagcctctcaagtagctgggattacaggcatgcgccacgaggcccggctaattttgtatttttagtagagatggggtttcactatgttggccaggctggtcttcaactcctgacctcaggtgatccgcctgcctctgcctcccaaagtgctgggattacaggtgtgagccactgcatccagcctcatcttaactatttttaagtatatagttcagtagtgttaggtgtattcacattgttgtaaaacagatcttcagaacttttcatcttgcaaaacaaactctatacccgttaaaaaacaactctcccttttttctggcccccaccctctggtaaccaccattctgctttctgtttctatgtttcactactttaaatacctcatataggtggaatcatacagtattgcctttttgtgacttgcttatttcacttagcataatgtccttaaggttcattcatgttgtagcatgtgacagaatttccttcttttttaagactgaaaaatgggccaggcacagtggctcatgcctagcgctttgggaggctgaggcgggtggatcacctggggtcgggagtttgagaccagcctggtcaacatgatgaaaccccgtctttactaagaatacaaaaattagccaggcgtgatggcgggcatctataatgccagctccttgggaggctgaggcaggagaatggcttgaaccctggaggcggaggttgcaatgagccaagactgccattgcactctagcctgggcaacaagagtgaaactctgtctcaaaaaaacaaacaaacaaacaaaacagactgagtaatgtactactatatgtatataacacattttgcctatccatttttgtttatcttttggatatatgcccagaattgggattgctggatcatatggtagttctctttttaatttttttgaggaacttattgtccatagcaattgcaccattttacaatctaaccaaaagtacataatgactccaatttttccaaatgcttacaatttgttattttctatttttttatggttgtgttatctgacttttaaaaattttagtcatctggctcagcacagtggctcatgcctataatcccagcactttgggaggctgaggcaggtggatcacttgaagccaggaatttgagaccagcctggccaacatggtgaaaccctgtatctactaaaaatacaaaaaaattagccaggtttggtggtgcatgcctgtagtcccagctactctggaggctgaggcaggagaattgcttgaacctgggaggcagaggttgcagtgagccaagattatgccactgcactcccgcctgagcgacagagcgagactctgtcttaaaaaaaagtaaataaaaatgttagtcatcctagtgtatatgaagtggtatatctcattttgatttgcatttccctaatagctaatgatgttgagcattttttcatgttcttgcttattggccatttgtgtatcttggagaaatgtctattcgtatcctttgctcctttttttaaaaaataattttaagttcgaggatataagtgtaggtttgttacataggtaaacttgtgtcataggggtttgttatacagattatttcatcacccaggtattaggcctagtacccattagctttgcttattttttaattgacttatttatttttttattattgagttgtaaatgttctttatatattctggttacaagtcttttatcagatatacgacttgcaaatgtcttctctagttctgtgagttgtcttcattttctcaatgataacatttggagaattataattttggaacactagtatattttctaattgctttgtattctaatgagaattagatcagagatgatggattggtttaccctgatttatttatatttaaaaagcttatgtttaaaatgtgcttcaaagagaaataatacccataagatattcgtctaattccttataggcacttaggaacaaatactttaaaagatgcatttttagtaataatctgttagtctaagaaaagtggtaacaggaaaagccaataatttattacgctttgttttccatgtcatcttggttactagtttatattggttggcttctttcctccctgtagggaaaagtaatagaacctctgaaagattttcataaagatgaagtgagaattttgggcagagaacttggacttccagaagagttagtttccaggcatccatttccaggtaaaaattagaactgaattttgtttgattcatctttagaccttcatgttgaagaaaaatcaattcagacaattctgaaataatctgtcatctcagggaatatgtaacatgagagaaaggaaaggatggttagggaataattgaaatcttttgagtatctactgtatttacttcattttattaaatactcattttccattgtatctgcatttaagtgttacattatccttgggagtctggcatctgatgttgccatcagatgagaaaaccaagacataaagatattttaataatattgccacacagtcctagtagtagagctaggatttgttatattatttgtaccataccgcagtgcgttccatggaagatgtgaggatttaaatttagctctttaaaatccttgtcctatgtctgacttgtttgaatggatgaaccacttattctgtgcagagaattcctggcacaatgtaactaattcctgaacaaataatacttcatttgctgtcatatagaaaaaaattagaggtgatacttgtttaaagttaggactgcaagtcttaacctgtttttgttactagttcttgagaggttgggcaagtctgtacatcaggttctagctcactgtaatagtgattaggggatgatttgggagaatgacctaattgaattgaaaagcataataatagccaacatttcttaagtactttctatgtgctaggcactctgctaaatacattttattgtcttatttaatcttcacagtggaaactactattatcctgttttacagatgaagaaacttagggacagcgactaatttgccaaaagttatgcagattgaaaggagtggagccagaatgatatccccaataatttttatctcagagtttatactcttaatgatcatattggctccataaacagctttacacatgtataacctatgtggtgattagcacttgttctcaaatcaagtaatcagattgagatctttagtccctaacctgcatgccggcgaagaatggtctgtggaccggtgtggtggctcatgcctgtaaccctgagtctactaaaaatagaaaaattagccaggtgtggtggcatgtgcctgtaattctagctactcgggaggctgaggcaggagaatcgcttgaacccgggaggcagaggttgcagtgagacaagattacaccacagcactccaacctgggcaacagagcatgactccatcttaaaaaaaaaaaaaaagaaaaaaaaaaaagaaaagaatgatctgtgaatgtaatggagggaagccaagtgttctatgtccttggtcattatttcatctagactcacttgatgttttaaaaatctattttgtatgttgagttttctattatgtaagacttcattggcaaaaatggttttactgctttaaaaactatcttaagtatgctgtttattctaaaggtaaagaatggactagggaattaattggacatagctgaggttttgcctataactaggcatctcaagtgatgccttttctgttgtagtaaagcagcaggatccagttttccatagatctatgcacaccttgtgtttttatcaacttttaagtatttggtaaaatagaggttgggtacagtggctcatgcctgtaattccagcactttgggaggcctaggcaggcagatcacttgaggtcaggagttccagaccagcctggccaacgcggtgaaacccgatctctactaaaaatacaaaaaattagctgggcatggtggtgcatgcctgtactaggtacactggtggctgctaggggagggtaaggcaggagaatctcttgaacctgggaggtggaagttgcagtgagctgagatcgtgccactgccctccagcctgggtgacagaatgagagtctgtcaaaataaaatagaaataccagttcacattttttggtattaaaaactcacattatttattagattatgtgtatattttaacagtataataccattcctaaaattagattgatagttgaagctggatgataagtaaggtagttaattatactgtcctctttatgtatatgttggaaaattcccttattaaaaactttggatgagcacatatgttataaactaaaaatatttactggataattttgtgatacttaatacatggactgtaaaaataggataggccaagtgcagtcagtggctcatgcctgtaatttcagcatttccagaagccgagcttctggagttcaagaccagcctgaacagcatagtgaaacccctatctttactgaaaaaattagccaggcatggctgccggtgcttgtaatccaagctatttaggaggctgaggtgggaagactgcttgagctcaggaatttgaggctgcagtgagcaataattgcaccactgcactctagccttggtgacagagcaagactctatctcttaaaaaaagggagataggaatgatagggagagaattaaacatactgtcttatttgagcctcacaatggaaactatgatagtattaccctgttttatagatgaagaaacttagggacagagattaatatgccaaaaagttatgcagactaaaacgtatgcataatttaaatgttgcagcattctaaatgttacaacatttttagaatgttgaagcattctaaaaaatgctgagttgaatgggaaactaatagctacatttggatacttatgatgggcagatggattttaattttggaaaggttttatgttttgaaactagtggcatttttatattagatttttatattagaaatataacattaatgttaaatactattattactcctacctttaggtcctggcctggcaatcagagtaatatgtgctgaagaaccttatatttgtaaggactttcctgaaaccaacaatattttgaaaatagtagctgatttttctgcaagtgttaaaaagg

SEQ ID NO: 12743 - DNA, 105 bp, Homo sapiens
ttttttgtatttttagtagtgatgggatttcaccatgttagccaggatggtcttgatctcctgacctcgtgatccacctgtctcggcctcccaaagtgctgggat

SEQ ID NO: 12744 - DNA, 197 bp, Homo sapiens
ggggttttaatttatgtaatgtgtgtggtctgaaaattgcaacgaaataattttaaagtggatctgggttggtagtgcttatgggagttaggcaaggaaaaatgcagattctctttagaatatcttcacctaggtcccaaaggattctcatagatagatttccaacaaatatgaggttataataaaaaatacaaatc

SEQ ID NO: 12745 - DNA, 1033 bp, Homo sapiens
attttttgtattttttctagagacggttttcgccatgttgggcaggttggtcttgaactcttgaactcctgacctcaggtgatccacccgtctcagcctcccaaagtgctgggattacagcatgagccactggccgacttttgcttcctttacagattactttgcagattgacatccaggctatacccttgtttatgtgagcgaggctgtgttgtaggcactggcactatacttacacagaagttggcaacttctcattgccttgcacaaatgtggataatagtaataacaaactaatgttgaatgattagaattttaatcagttctttaaaagtagccattattttggcatgttaggtagggagagattcaaattatttatgttatcttcccaacttgagaatggcattattagatcaagccattagacttatagattgcggaagatttagatgtacttcttaattatgaaaattacatttaccttactcaaataaccccatatatacctaaaagttttaataaactaaagcatgaccacatgactcaatcagctgtccgtaataacctgtggtataggtaggacttagttgggcaaagggtgagatgtggccatcttcacgggctcataagagataaccaaggtcccttcaggtcggccagcctcatcatgcctcagctctttctaatcctgcttattagtaaggtggatgtttattcatttatttatttggttagttaaataacaggccgcaatttactgtgttacttaaattttacttaagtaaaatttaagaagaagaagaagatgatgactgtaaaaacaaaggtgtgaatatatttagctatacatgagataggatatcaaatacataaatagttcaatttgcagttgcacagtgccatttcacccaggttaaacaataggaagactcgatgcatacgtgtcatctgtaaatgctctcatgtgaaagaaattgtgaagtaaaataaagtatcttgagtagaaatttttctacattttctcaaaata

SEQ ID NO: 12746 - DNA, 1033 bp, Homo sapiens
attttttgtattttttctagagacggttttcgccatgttgggcaggttggtcttgaactcttgaactcctgacctcaggtgatccacccgtctcagcctcccaaagtgctgggattacagcatgagccaccggccgacttttgcttcctttacagattactttgcagattgacatccaggctatacccttgtttatgtgagcgaggctgtgttgtaggcactggcactatacttacacagaagttggcaacttctcattgccttgcacaaatgtggataatagtaataacaaactaatgttgaatgattagaattttaatcagttctttaaaagtagccattattttggcatgttaggtagggagagattcaaattatttatgttatcttcccaacttgagaatggcattattagatcaagccattagacttatagattgcggaagatttagatgtacttcttaattatgaaaattacatttaccttactcaaataaccccatatatacctaaaagttttaataaactaaagcatgaccacatgactcaatcagctgtccgtaataacctgtggtataggtaggacttagttgggcaaagggtgagacgtggccatcttcacgggctcataagagataaccaaggtcccttcaggtcggccagcctcatcatgcctcagctctttctaatcctgcttattagtaaggtggatgtttattcatttatttatttggttagttaaataacaggccgcaatttactgtgttacttaaattttacttaagtaaaatttaagaagaagaagaagatgatgactgtaaaaacaaaggtgtgaatatatttagctatacatgagataggatatcaaatacataaatagttcaatttgcagttgcacagtgccatttcacccaggttaaacaataggaagactcgatgcatacgtgtcatctgtaaatgctctcatgtgaaagaaattgtgaagtaaaataaagtatcttgagtagaaatttttctacattttctcaaaata

SEQ ID NO: 12747 - DNA, 1033 bp, Homo sapiens; identical to SEQ ID NO: 12746

SEQ ID NO: 12748 - DNA, 1110 bp, Homo sapiens
caggtaactttcgaccgactttccccaagagaaaattcctagaaattgaacaaaaatgtttccactggcttttgcctgtaagaaaaaaaatgtacccgagcacatagagctttttaatagcactaaccaatgcctttttagatgtatttttgatgtatatatctattattcaaaaaatcatgtttattttgagtcctaggacttaaaattagtcttttgtaatatcaagcaggaccctaagatgaagctgagcttttgatgccaggtgcaatctactggaaatgtagcacttacgtaaaacatttgtttcccccacagttttaataagaacagatcaggaattctaaataaatttcccagttaaagattattgtgacttcactgtatataaacatatttttatactttattgaaaggggacacctgtacattcttccatcatcactgtaaagacaaataaatgattatattcacagactgattggaattctttctgttgaaaagcacacacaataaagaacccctcgttagccttcctctgatttacattcaactctgatccctgggccttaggtttgacatggaggtggaggaagatagcgcatatatttgcagtatgaactattgcctctggacgttgtgagaattgtgctttcaccagaatttctaagaatttctgctaaatatcacctagcatgtgtaattttttttccttgcctgtgacttggacttttgatagttctataagaataaggctttttcttcccttgggcatgagtcagatacacaaggacccttcaggtgttactagaaggcgtccatgtttattgttttttaaagaatgtttggcactctctaacgtccactagcttactgagttatcaggtgcaggtcagactcttggctacagtgagaggcagcttctagacagagttgcttaatgaaagggtttgtaatactttacaaaccattacctgtacctggcctggcctccaaaatattaacattctttttctgttgaaactcgcgagtgtaactttcataccacttgaatttattgatatttaattatgaaaactagcattacattattaaacgatttctaaaatc

SEQ ID NO: 12749 - DNA, 102 bp, Homo sapiens
aggctggagtacaggggtgcaatctcagctcactgcaacctctgcctcccgggttcaagcgattctcctgcctcagtctcccaagtagctggaattacaggt

SEQ ID NO: 12750 - DNA, 1110 bp, Homo sapiens
caggtaactttcgaccgactttccccaagagaaaattcctagaaattgaacaaaaatgtttccactggcttttgcctgtaagaaaaaaaatgtacccgagcacatagagctttttaatagcactaaccaatgcctttttagatgtatttttgatgtatatatctattattcaaaaaatcatgtttattttgagtcctaggacttaaaattagtcttttgtaatatcaagcaggaccctaagatgaagctgagcttttgatgccaggtgcaatctactggaaatgtagcacttacgtaaaacatttgtttcccccacagttttaataagaacagatcaggaattctaaataaatttcccagttaaagattattgtgacttcactgtatataaacatatttttatactttattgaaaggggacacctgtacattcttccatcatcactgtaaagacaaataaatgattatattcacagactgattggaattctttctgttgaaaagcacacacaataaagaacccctcgttagccttcctctgatttacattcaactctgatccctgggccttaggtttgacatggaggtggaggaagatagcgcatatatttgcagtatgaactattgcctctggacgttgtgagaattgtgctttcaccagaatttctaagaatttctgctaaatatcacctagcatgtgtaattttttttccttgcctgtgacttggacttttgatagttctataagaataaggctttttcttcccttgggcatgagtcagatacacaaggacccttcaggtgttactagaaggcgtccatgtttattgttttttaaagaatgtttggcactctctaacgtccactagcttactgagttatcaggtgcaggtcagactcttggctacagtgagaggcagcttctaggcagagttgcttaatgaaagggtttgtaatactttacaaaccattacctgtacctggcctggcctccaaaatattaacattctttttctgttgaaactcgcgagtgtaactttcataccacttgaatttattgatatttaattatgaaaactagcattacattattaaacgatttctaaaatc

SEQ ID NO: 12751 - DNA, 17367 bp, Homo sapiens
accatggtctagcggtagcatcagtgtcaaggaaaaacacccgctacttagcagacctgcaaagggagtctccctttccctgggggagtttggagaagactctactcctccacctcttgtggagggcctgacatcagtcagacctgcccgcagttatccgggggactgtctccctgtgatgctgtgcttcagtggtcacgctcctagtccaccttcatgttccgtcctgtacgcctggctctgccttttagatagcagtagtaaattagtgaaagtactaaaagtctctgatatgcagaagtaatggcataagctgtctctctctctccctctctgtctgcctcggctgccaggcaggtaagggccccctgtccagtggacacataacccacgtgaccttacctatcattggagatgactcacactctttaccctgccccttttgctttgtatccagtaaataacagtgcagccagacatttggggccactaccggtccccgcgttttggtggtagtggtcccccgggcccagctgtcttttcttttatgtctttgtcttgtgtctttatttctgcagtctcgtctccacacacagggagaaaaacccaccgaccctgtggggctggtccctacaaagataagggtgatagtatctcccctcaagtgttgccagaaggaccaactaatgccccacaccgagcaggcacttgatggatgatggcatttacttagaaggaaggagacgattctcattttttccaccagataaaaactaagatacatgggtttaaaaaatgggccttttgggaattaagggcccagaatgaaacatgagcctcctggcctttcctggatcaccgtcaggcttttattgagagaggagcagctccccactggctgcttggcttgtcattgcttcactctgtctcctttggccttgccacagatctacgcagaccccaccaagaggctggagctgtacttccggcccaaggacccatactgccacccagtgtgcgccaaccgcttcagtaccagcagcctgctgctccgcatcaggaagagaacgaggcggcagaaaggggtgctgggcactgaggcccactccgaggtcacatttgacatggagatccttggcatcatctccaccatttacaaatttcagggtaactgaaatctgctcttgcaatgtctggttatttcagggctggccatcctagctgcctgcaggagctgtgtgggtcatctgcaccagtggagggggccaggatatgcccaggggctgtggggacacagcagggcacaggccccatccaggaggcagcctttcttccctccagccaacagttccccagagactgcaggttcattgctgcccaatcttcagcattcttaagctagaaatctcctaatttttaatgaaaccattgtgtgggaccaaataaaactggtcagtagacctccagtctttcccccaccacagtgttttgaaccttctcttgtctcggctgctgttggtcttgccctcctagctcccgaagccccttgggacctcctcctcctctgaactctcagcaggttgaacgtccctcgtggagccctcaatcaggtttcccacctaccaggaaccccagtgaggaagcaataaagcaagggagggagacgggtgagaaagacagactctggcattgtgcctgcctgagccctgccagtttctttgggaggtggcttggcttccctgagcctcagtgtccttgtctgtgcagtgcgggctacagagcctgcgttccttaggccctcgtgaagattccgggaggcaatgcttgtgaatgggccagcctctggcccacaggaggtgcctggcatattactaacaaggcttagagatggctaagttacatctgcagttctaggcagaatctgaagagtataaagattgagaagggcaaagagtactagaaagaaaagaggggaagaagaaagtgaaatgaaggagaagcaggacctggggtcccatgggttgggcatttttaatggcagtcattctggtgggtcatggcattcaccaaagagggctgttcttttgggacaaggtttcccaagtgattcataaaacataacacctcatatttttcatcgaattgaaccagcatcttgctgctctgtgtgtgtctctggactggcagcatcagcctcacctgggagcttggtagaaatgcaccaggtcagaacctgcatttagcaagatcccagcagattcatatgcatgttactaggttggtgcaaaggtaattgcaggttttacagttaaaagtaacattcatctaagaagcactgacctggactccatcctcacctatcatgtagctccccacctccccaaaataattttcatgtaagtgacttagactgcatggagccaactttgcagaggcatttgggaagggtgtgttttcctgccaccctcaccctgcagcctccaccacatggcccactcagcacctccctaagcagatgtgggtgtcggtgtgtggcagctgcccattcctggactcaatgtctgccatctgcccacctctctttctagggatgtctgacttccagtacttggctgtgcatacggaagcaggcggcaagcatacgtcaatgtatgacaaggtgctcatgctccggcccgagaaggaggcctttttccaccaggagctgccgctctacatccccccacccatcttctcccggctggacgccccggtggactacttctaccgaccagagacccagcaccggtaaggcccccctccatgcagcctcggttctctatcctgaaaatgggatggtccgggcacggaggctcacacactgggcgtggtggtgcacacctgtaattccagctactcgggaggctgaggctggagaatcacttgaacccaggaggtggaggttgcagtgagccaagatcgcgtcactgcactccagcccgggtgacagagtgagactttgtctcccaaaaaaaaaaaaaaaaaaaaaaaagaaaatgggatgacagtagtactacccaacagacgtattgggattgaatttaaaaagtgtgtgcagttctcagcacagggctgagtacagaacagggccttagtaagcggtggcctgtgtgatcgccaggttggcctcagtcctgaggacagtgcaaagaacgtgactgtgggacatgtgggttcctgctgagaaatgtcctttggcttaatcccctggtcattgctgaccagccagtctctggaccttgctgtcactagtaatgacactacctaagcaagcctcgtgggaatgtcccactctctgaccccagctctttcctacttcctttgctccccatggcctcaccgtccctgtccgtggcggagattttgcagcctctttatcatctgtccctgccctgccctcctctctttgccacactcacctgccaagccttggtcctacttcaccccagctgtttaccctttcctggtctgccctgtgcggctggaggtcgcttcagagaacccctgaccctgcccatcgcccagtgccatccttctcaaggcatctgtgactctacacagctctcgcctgctctgtacttggttatggactgcgtcccctccagaacacggtgcctctcctgaggacaggcgctcactctctctcatcagtagtgggtttctcctacaccgagagctatgaaaagccacatggacgtgactcatagtgcacccaccgccaccccctgccacccacacacaggctccgtgcacagcctgcccaagcccacatgcaattcagatgaaatgaattctgtaactcagaggttcttgacataattagagacctcagcggctgttggaaaggcaggcctgggcattgtcaaatgtagtcaaattgtcaaatgccatacattgacataaaagaataggatttcctttatataaaatccaagattgaatactgtgaaaacaaaatgaagaaaacaagtttgacagtatccaactggggatgaataacattgaccagccacactgccagttatttcacgtccctgtgcagcagcgctgtgagtgcatctcacccaagcctgggagcaattccccagggttcctgacacccccatcgtacacatgaggaagccgagacatggggtcagcgccacgtcccgccggcagcaccgccctggtctctcccactctgcaggctttgctcgtggcccagtgccaacggtgtcctgatttttgtatgctctactttctaaaatgacgcacaaaaagacaacatggaaaaaaactttgcattgtaatggatgctccccagaagtagcgacttggcctgcttcggtctctgtcatagccccggtgcccagaacagagcctggcctgtgagaggtactcagcaagtgtccatgggccccacacagatttaggggagcaagattactgccaacagatgagcaaaatgaaagggcctttttttctttttctttttgaaaggcggagtcttgctctgtccacccaggctggagtgcagtggcgcgatcttggctcactgcaacctctgcttcctgggttaaaacaattctcctacctcagcctcctgagtagttgggactgcaggcgcccaccagtacgcccagcttatttttgtatttttagcagaaatgaggtttcaccatattggccaggctggtctcgaactcctggcctccagtgatccgcccacctcagcctcccaaggtgctgggattacaggtgtgagccacagtgtccagcccgaaaaggactttgaaaactgggccagaggtgatggtgtttgttgaataattgttccatagcatgttttaagcttccaaaaatgcagccctcaagagaatgggcttgggcctagtgtagtggctcacacctgtaattccagtgatttgagaggctaaagtaggaggatcacttgaggccaaaagtttgagaccagcctgggcaatatagcaagactctgtctctacaaaaaaaactaaaaaagttagctgggcatggtggcgtgcacctgtatagccctagctactcgggaggctgaggtggaaagattggttgaacccaggattttgaggctgcagtgaatatgatcacaccactgcactccagcctgggtgacagaacaaaaccctgtctcaataaacaaaacaaaaaacaaacagaaaaaagagcggactctgtggactgatgggacccatgcccaggtgcctcccttgctctgtgagaaaggcaggtgcaagaccagattctgtggaatagaaataaatggtggtgtgataacagaagcctagaaaagtctggaagatttggggctcagagcagttttctttgaaggggtgggagggctttctcattcctcattatgtgtttcctttatgtcctgactgagcacctgtggtggcccagggcactccctggagcctggtgtccacggacagcacagcagctggggtgcagtgcaggggcggggagctagacggagcatgagtacatggctgggagccttaaaggagatcatggggagtgggccacactggtggaaggcagtgggccggggctacaggtagcagcgagggccctcagaggagctgacatctggagctgagacagagccagccaggtgaagatccagggagaactttccagaccaggggattggcgcatgcaaaggaaggctggggaggctgctgtgccccagagcaggtgagccagagaatgggggtggggagtgaagaccagtgcctaggcttcatcctcaagagagagtgtgttattctctgcctccggaaaagcattgcagaaaggtggagagaattggattgtctagtagcccccacgtgcccatcaggagcgtccagtgagcaacattctgctcctctccacccccagtggcacagtgctgccttcagaaacaagcagtgcggatctctgacagggaagactcatgtttcagacagactcgcaataccagtctcctacgcaacagaattaatagcactccccaacatcacccacaaccagtccttgttcactttttcccgattgtctcaaaagccactcaggagccaaacaagggccacacatgttgcttttggttgctgtcccctagtctgtaacatcctctaccaccaccaccccctacttttttctgattgtaagaataaattgtacctgttagaaaaaaacaaaacattgtggaaatgtattaactaaaaagaatcaagtcactttgcctccctgcagaaaactgttgcacatagaatgataccattttctgtaagtgtattgtactcactataagagtttgaagcagggggtgacatgatccttcctttttttttttttggagacggaatttccctcttgtcacccaggctggaatgcagtggcgcgatctcggctcactgcaacctctgcctcccaggttcaagtgattctcctgcctcagcctcccgagtagctgggattacaggtgcgcgccatcacgcccagctaacttttgtatttttagtaaagacggggtttcaccatgttgaccaagatggtctcaaactcctgacctcagatgatccgcctgcctcagcctcccaaagtgctgggattacaggcgtaagccaccgcacccagcctattttttaaagttacttattggccaggcatagtggctcatgcctgtaattccagcactttgagaggctgaggtgggaggatcgcttgagcccagaagtttgagaacagcctgagcgacatagtgagaccctgtgtctacaaaaattttttttaaatcacccaagtgtggtggcacgtgtgcctgtggtctcagctacttgggaagttgagatgggaggatggcctgagcctgggaggtcaaagctgcagtgagctgtcattgtgccactgcactccagcctgggtgacagagtgggaccgtgttttaaaaaaaaaaagtggttttttggtttgttttttcttcaccacaagcagcatactcttgtcagaaacaaaaatacataaaagaaaacagactgggcacggtggctcacacctataatcccagcactttgggaggccgaggcgggtggatcacctgaggtcagatcaagaccatcctggctaacacagtgaaaccctgtctctactaaaaatacaaaaaaattagccaggtgtggtggtgggcgcctgtagtcccagctatttgggaggctgaggcaggagaatggcgtgaacccgcgaggcggagcttgcagtgagccgagatcgcgccaccgcactccagcctgggcgaccgagcgacaccccatctcaaaaaataataatatacaaaaaattagccgggcgtggtggcgcatgcttgtaatcccagctacttggggggctgaggcaggagaatcgcttgaacccaggatgtggaggttgaggtgagctgagatcgtgccattgcactccagcctgggcaacaagagtgaaactccatctcaaaaaaaagaaaacagcacttgtcagcactgccgcccctggcactagatggcagcagcatctgagttactgctctgccctgtgggccagtgggaagctgtttccagcccctggggtaaaatgagggaggagggccagctgccctcgggccccaaggcccccctccctccccatgtggtttatcagtttccagcacctggaaagaacctgcattttctcccagggctgctgtcgattctcctgccctgctcacgttgctgggtgcatgaggactggcagggaggagacctagccactgcctccttggccccttcctggggagattgagcttcccacaaaccaggtgggcaagcagaggctgctgggtggcctgacggggtcgtcctaactggaggatggtgggtccctcctgttcctcagggactctccaaggtggtcctgttgactttgccatcagcacccttcgacccctgccagcagttccccacctacttagaatcatggtgacacagaccacagcctgaggccaccatggggagcggtctggggatgcagccaaggctgccgcagcctctccctacagggttgggcacaggtgggctgctcttgcaggtgaccacccggttttcctggggaacatctttgaaaacgcgatagtgctgacctgtcccgtgcggtttctaacgcaggcactttaaaaagaaggcccaggctcgatcccgtctttctagttttgtttcacaatgtgaaaattactgctattctttgtaagtgtgcagatgctatgtactcatgtagaaaactaaggtaaaatggaaacacattttaaaaggtaatgatcacccgagtgaatttgatgatgtccgagacctactttaagatgcacttcgatgaaatgcagttaaccatgtgctgatcattgctgaagctggtgacgggcttgtgggggttctttacactggcctgcctgcttttgtgtcagtttggtgtccaaccttaaagacgtaactactacaaatattttgagaaatacctacctaagggtgttctgtgccaacatacagaggtagttctagaatctctgctttgtatgtgtgtgtatgtgttttaagactttatttttttagagcaattttagaatcacagcaaaataaggcgcagcgatttctcctatgccccccagccacccccactcagcctcccccgtgatcagcatctcagtagagtggggcgcttgttaccagtggatgaacctatgctgagacgtcgtcacccagtgtccgtagttgacattggggttccctcttggtgttggacattctatgtgtttggacaaatggaacccttggctttaacccctgtgtttcatgacaatgccatttggtgaggttctttgttcattcatctacatgtggtcgagatgcttgtgagccaaagagtcatgctctgttgggtggcaggacaggtgtgtgatgggacctttgcagccagccttctcgatgggagtcccagctccttcccaggagctccgtctctgggcaaatttcccagtccctgtggtttcagctgctttattagaaaatggtcccttctctgtaggattagtttgagcgttaaataagtgaatcgcatgtaagcagatgtgagtgagtgcagctcttgtccctgttttgacaacggattgcgttctctcatgcagctgtgctgggtgatttcaccattgccagctgctggacattagactctgtccagtttttcactggctggacagtgctgtgcctgactcagtgcacttttggggccaccagccccatgacaggtgccctttcctgcactccagcctctaggaccttttggcctttccccagtttgagagctgcaggccccagggtttctctgagttgtcataggcagttgtggctgcgtctcttcctctgtgaatacaggttcctttagcagccaactctggggtcctttcccagcacagatgtccagagagaggcacacggtggctgtgggccttggggggttctgggctccctgcctggtctggcccagcgggtgcctgggatggccttggtgctcctgttctcacctgtactctctgcccccagggaaggctacaacaatccccccatctcaggtgagaatctgattggcctgagcagagcccggcgcccccacaatgccatctttgtcaactttgaggatgaggaggtgcccaagcagccactggaggctgcagcccagacgtggaggagagtctgcactaaccccgtggaccggaaggtggaggaggagctgaggaaggcaagtcctgcgctgcgcctggccccggtggctccagcctctctgttggcttcccgtgtttacccagctgctccctgttcctggctgtggggttggctgcactgacctttacccattccttagtgcatgggaacttctcaccttcagatgccatgtctaaaggctgtgtcggtataagttctacattcccaaggttgaaaatgcttcttagagttcttaagaaaaatatgcgtgcgttgttcagatgtgacataaacgtggagctctgggatccactgagctcttattcttccattcactcattgcagccaagccagtggggcacctagtgtgccaggcccagcactttcttaccgttagaactggaaccgtgctgccaggcagccctccttccccgggcttgcgggtgccgtggagtcctgcgtccccactggcatgagcatcaggttcacaggccactgccacctggagcccggcgcttcccttacgcagtgtgcctgtgggagaccacgtggatgtcttgttgatttccagcagtcactggggcacactgtcagtggctccttattgcccaccaggcacagcccacattcctgacctgaattggctcgtgaggcccgctgccccagccccctggccctctacactccggccacactgacctttgcagtcctccccgggccaggctgtccccttcagccctgacgatgtcccacctcaggcacctgttctgtagattggggcagcatggggaccctgggactctagcatgtgccccctgagccgtactccccaccgcgctgtgggctctatgaggacagcgaccatgtctcttatcgtttgagagacccagccccacaactgcacttggcacaggctgggcatgcagcccaggcttctgagggaagggatgaattagtgagagcaggaggtcctagggccacgccctgtgtgtccagcccctgtcctctaccagctcctctctggaggggccgctggggcccagaacatgttgggagttcagggccgaagggtggaagctgctggtgctcatctcagcctctgcccttggcctccccagctgtttgacatccgtcccatctggtcccgaaatgctgtcaaggccaacatcagcgtccacccagacaagctcaaggtcttgcttcccttcatagcctattacatggtaagtgtcagctgcccacccacctgccttggtttccacccatgtggtccctggtccctgctgtgatgtcttagagccacagtaagagcagccaaccccctatcctggctccccatccttcctgccccacccccatcctggcccatccttcctacccacccctggcctggccctcatccttcctgccctgcccccaacctagcacctcccccgtcctggcacccccatccttccttcccccctgtcctggccccccgatcctagcatccctaagacagcttattaaagccagctagaaaagtttcagctccctgagtccagggcgccctccacagcctgttgggctgcagaacccagcccctgaccacagcggccccatgtcgtcctctacctgtgttgagtggggttcagtgggaggcagatccacctttgatccacaagcatgtaaagacacatgtcattactgaggttccaaaggtgctggttggaaagggatcctccccgctgccaggcctcacagagcattaggggaggccagcgtaagacatgactgtgagggtctgcaacaggcagtaggacacaagaaagactcatttcttctgccttgttggacttccggctcaggagagcgacctgtgctgcttggcgttggcattttattttattttatttattttatttattttgagatggagtctcactctgtctcccaggctggagtgcagtggtgtgatctctgctcactgcaacctccgcctctgggattcaagtgattctcctgcctcagcctcctaagtagctgggagtacaggcgcacgccaccatgcccagctaattttctttttttgcatttttagtagagatggggtttcgccatgttggtcaggctggtctcgaactcctaacctcaagtgatctgcctgtctcggtctcccaaaatgctgggattataggcgagagccactgcggctggctggcattggctttttagacataagccattcaaaagctccgtttagggacagaagatgtctcatcgattaggccagtagtaacattgggcacttaatatgtgccaggaaccatggtaaaggctccacgggcgctatctcatttaatcctctgaaaaaccatgggaggccaggcatgatggctcactcctagaatcccggtacttcgggaggctgaagcgggagaatcgcttgcatccaggagtttgagacgagcctaggcaacataatgagaccccatctctacaaaaaaattaaaaattagctgggtgtggtggctcgtgcctgtagttccagctacttgggaggctgaggtaggaggatcacttgagcccaggaggttgaggctgcagtgaaccgtgattttgccactgcactcagcctgggcaacagagtgagaccctctcccccaaaaaacaaaaacccacaggaaagggtgctccttttccctccatctgacaggaagaccaaggtttggaaaggccacgtgccctcaccaaggtgacagggcctgcatgtggcagagcagggctgggcatccagagccctgtccccagctcctgagctcttctgctgcctcactgtaggctctggcccgtccagggacctgggccttcacctcacctcacattttccccacttttctgtcccagataacaggcccctggcgcagcctatggattcgatttgggtatgacccccgaaaaaacccagatgccaagatttatcaagtcctcgatttccgaatccgttgtggaatgaaacacggtaaaaattcctgaaagctttgcttcctgcctttctctctctttatctttcagtttctagcattctcttttgtagtaagaatcttttcatttggaaagaataaaaaaaccttttgcccccgttgctgagactcttttgaatgcagaatggcgtggaaacgaaagtcctagttctgtgctggccccaccactgaccgcccgtttctgaaccacagtccctcattaagtgactccacgtgccctatggtcctgtgatgcaggccaggcacttgtgagagcatcagtgcccgccctgcctgggaagtgctgagatgtgttggtgaccgcagtggcgtgcttggcagtctggggttgccctctcaggagctggccccatggacccaactcccatctccagtgtgaagccagtgttgtgtgccgacgggccctgtgcccgcccacctgacttgcccgccctcgcctacaggttacgcccccagtgacttgccggtcaaagcaaagcgcagcacctacaactacagcctccccatcaccgtcaagaagacatgtaagcgtgccaggcgccttttgtgggtcatgagtgatttgccaaggaaggcggggcacctggacccagacggggaggtggttcctgggggtcactccagggctctgccggtcattcctcccctaggagggggtgggctggcaggagggcagggcatggtggttgggagagacacctcctccccaccctgcacattccaagcactgctgttgtccccacgcagccagccagcttgtcaccatgcatgacctgaagcagggcctgggcccgtcggggacgagtggtgctcggaaaccagcttccagcaagtacaagctcaaggtgggcgcccctggaggccaggaatggaggggaggacttccctcttggggccgggcaccttgtgggtgacacctggggggctgtgattagggcagctctgcccaccggggcctcggcaccttgcttccttttaggtcagccttcagacactgagggtgagaactcgggtgcaaagccccagggctgtgtgtgttggggacatctggcgaagaggtggtgacaagtctcagggaagtctggcaccagcagctgcatgtggttgtccttctcgagccctttgggagcctgggcccccactgagccacgtgaccactccgggaatgatcggaattgggcacacacaggaggacagagccagagcaggccatgtgggctgcagctgtggcaggagcctcactggctcacgtttccgtcagtgcggttgcccagcgggggttggcggtttccagagctgttcccacattcaggctcccgcaagccgctccacagccctgggggaggccgagaagggggcatcccgcacggtggaatcacctgccgagggagtgggtggcagagatgagtgcagcagagacgggtgatgcgagggacttgctgtcccccagtgtctggggccctgcctattttctaggttttttagacctttgctgccttcccagtgaggggcgatcatgccacagcctgtgcggccttccttctcgaggcctctcctaggaggccgttatccttactctagaactacatggctgggtacggaaaggagagagcaaacactcactaagccctgcttttcccagaaaagatgtcagggcagcccatagggggacatagggtgacaaattagcagcagtgggtgagggataaggtcagagtgcaggagggcacagagagcagagcccggcacaaggctagtgccagccccatgccatgggcgccatggcctgctgcacgggcgggctcaccgtttccagtggccccaggagggcctgggtgctcctctgcctctcccagagcctcctggggagttggacattgttttttccccaactcctccgtggccttccagcctgtctgcccaacctgctcctggtgaccagccagctccctggagagaccccatgggagcctacatggagtctgcaacactggcagccccagggctctggctcaccttccctgtctctctccccctttgtcaccaggactctgtctacatcttccgggaaggggccttgccaccctatcggcagatgttctaccagttatgcgacttgaatgtggaagagtacgtatgggaggggccctgagacactgaggggggcccgtgggacccagggaccaaagcggtctctgaactcttccacttcacgtcggccttcatctccggcaagagcactcgcctgtctgggagtttggtgctgccgagagccctggcatgctggtggccctcgtagaggcggtgccctatagaaagccgtggctccaagctgcgcagagacagttcttactgttatgtccttgctcctcttccactgtccacataaaggccccatgaggtggttctcaatcccaggacccatcagatcccagaaaccttttatcgacttgttctcagtgatgtttaaagaattgcagggaaagggcactcactgggatgagaggagatgggaacacatcaaatacatcttgaactctgctgaaagccatggttcaccagaagcatgtgcagtggtaacacggccagcttcatgtgtgtgaggcggtccagggagcacacaggtttagggccccagctgggaacacacagcttgtgtttccagttcctctctgtagacttcgctcacggggctgcctttgatctcagtacagctctgcctctggcaaaaaccaacactggcatctcttagcagagacccgccctgggactttatgtcccaaccctctccccacccccaggttgcagaagatcattcaccgcaatgacggggcagagaattcctgcacagaacgggatgggtggtgcctccccaagaccagcaacgagctcagggacaccatgtccctcatgatccggcagaccatccgctccaagaggcctggtaagagccgcttggggtaaagggggtccaggatgcctggtgatctcctttgagacagaggtgtccctaaggggacccattcctgggaaatggcacccaggtggcatcatcttgcccctggccctggtgggaggaggacattgtgagccagagcccagcccaggtgctggcatcaccccagctgcccagaggctgcctcagccgaggccctcagccctgcggtccggggcaggagacaagcccagaggggctgggtgcagcagcctggcactgccatcggggcctccacctgacgccctcacaccagcccatgtctttcagctgtgcatgcgcaggctctgcctctgtcttcttcctgttctgtgtggcccagccccttcctggaaccaggcagccctggcaggagtgagggccagctgcagggaaagtgaagggggcaacacctgccaggctgtgggtctcacgaggctcgggggagttataagaggccccctctctcagggaactcctcccaggcttggggaggaggcatcctggacccagccacgccccacagatctgaccgaagcaggggttcttggtcttgcttggaacccagattcagccccctttgggaatctaatcaagggtgtggaccctttcccagagaaaatggtgtgttcactcctgagggtccatgggcccttgaagctgctcatggctcccctgctgcaggattcccctgggtgcccgtcaaactacagcttccctggggggcctccaccccatacttacccaccagcttcttaagagctcgagctcggacccttatagtagtaaacaggctccccagagcctggtggcctttctggggccacccggcagcctgcatgggacacccatggccttgtctcctccggccccagctctcttttccagctcagccaaggctgatggcggaaaagagcagctgacgtacgagtctggggaagacgaggaggatgaggaggaggaggaagaggaggaggaggacttcaagccatccgacggcagtgaaaacgaaatggagacagagattctggactacgtgtgacagggcccaaggctgggcctccctgacccggccagactggtgtctggcctaatgagggagccggggctccccattgccacccacagtgcccggaatggccctaggaggccctctgaggagagctagagtcccagcaaagggtgcagctgaccctagcactggctgtgacatgctgcttggtgctgcctctggtcctgaggggttagggacatccccaaagggtataccctggctctgccacccatgaaccagcccagcatccagccagtgagtgggcacccaatgcctctcaggatgagaccagtaaatgccggaggtggagctgggcagctgtggagccccaggccacaggccagtctcgcttggctctcatgactgtggtggtggagatagtgtggggagcctcgcccatggtctcacgtggcaagaagtgcctttagctctggatcccaaccgtttggcacagctttggccacagccaggcccctctggaattgtccttattaaaccagtttcccgagaagt

SEQ ID NO: 12752 - DNA, 6438 bp, Homo sapiens
acatccgtcccatctggtcccgaaatgctgtcaaggccaacatcagcgtccacccagacaagctcaaggtcttgcttcccttcatagcctattacatggtaagtgtcagctgcccacccacctgccttggtttccacccatgtggtccctggtccctgctgtgatgtcttagagccacagtaagagcagccaaccccctatcctggctccccatccttcctgccccacccccatcctggcccatccttcctacccacccctggcctggccctcatccttcctgccctgcccccaacctagcacctcccccgtcctggcacccccatccttccttcccccctgtcctggccccccgatcctagcatccctaagacagcttattaaagccagctagaaaagtttcagctccctgagtccagggcgccctccacagcctgttgggctgcagaacccagcccctgaccacagcggccccatgtcgtcctctacctgtgttgagtggggttcagtgggaggcagatccacctttgatccacaagcatgtaaagacacatgtcattactgaggttccaaaggtgctggttggaaagggatcctccccgctgccaggcctcacagagcattaggggaggccagcgtaagacatgactgtgagggtctgcaacaggcagtaggacacaagaaagactcatttcttctgccttgttggacttccggctcaggagagcgacctgtgctgcttggcgttggcattttattttattttatttattttatttattttgagatggagtctcactctgtctcccaggctggagtgcagtggtgtgatctctgctcactgcaacctccgcctctgggattcaagtgattctcctgcctcagcctcctaagtagctgggagtacaggcgcacgccaccatgcccagctaattttctttttttgcatttttagtagagatggggtttcgccatgttggtcaggctggtctcgaactcctaacctcaagtgatctgcctgtctcggtctcccaaaatgctgggattataggcgagagccactgcggctggctggcattggctttttagacataagccattcaaaagctccgtttagggacagaagatgtctcatcgattaggccagtagtaacattgggcacttaatatgtgccaggaaccatggtaaaggctccacgggcgctatctcatttaatcctctgaaaaaccatgggaggccaggcatgatggctcactcctagaatcccggtacttcgggaggctgaagcgggagaatcgcttgcatccaggagtttgagacgagcctaggcaacataatgagaccccatctctacaaaaaaattaaaaattagctgggtgtggtggctcgtgcctgtagttccagctacttgggaggctgaggtaggaggatcacttgagcccaggagttgaggctgcagtgaaccgtgattttgccactgcactcagcctgggcaacagagtgagaccctctcccccaaaaaacaaaaacccacaggaaagggtgctccttttccctccatctgacaggaagaccaaggtttggaaaggccacgtgccctcaccaaggtgacagggcctgcatgtggcagagcagggctgggcatccagagccctgtccccagctcctgagctcttctgctgcctcactgtaggctctggcccgtccagggacctgggccttcacctcacctcacattttccccacttttctgtcccagataacaggcccctggcgcagcctatggattcgatttgggtatgacccccgaaaaaacccagatgccaagatttatcaagtcctcgatttccgaatccgttgtggaatgaaacacggtaaaaattcctgaaagctttgcttcctgcctttctctctctttatctttcagtttctagcattctcttttgtagtaagaatcttttcatttggaaagaataaaaaaaccttttgcccccgttgctgagactcttttgaatgcagaatggcgtggaaacgaaagtcctagttctgtgctggccccaccactgaccgcccgtttctgaaccacagtccctcattaagtgactccacgtgccctatggtcctgtgatgcaggccaggcacttgtgagagcatcagtgcccgccctgcctgggaagtgctgagatgtgttggtgaccgcagtggcgtgcttggcagtctggggttgccctctcaggagctggccccatggacccaactcccatctccagtgtgaagccagtgttgtgtgccgacgggccctgtgcccgcccacctgacttgcccgccctcgcctacaggttacgcccccagtgacttgccggtcaaagcaaagcgcagcacctacaactacagcctccccatcaccgtcaagaagacatgtaagcgtgccaggcgccttttgtgggtcatgagtgatttgccaaggaaggcggggcacctggacccagacggggaggtggttcctgggggtcactccagggctctgccggtcattcctcccctaggagggggtgggctggcaggagggcagggcatggtggttgggagagacacctcctccccaccctgcacattccaagcactgctgttgtccccacgcagccagccagcttgtcaccatgcatgacctgaagcagggcctgggcccgtcggggacgagtggtgctcggaaaccagcttccagcaagtacaagctcaaggtgggcgcccctggaggccaggaatggaggggaggacttccctcttggggccgggcaccttgtgggtgacacctggggggctgtgattagggcagctctgcccaccggggcctcggcaccttgcttccttttaggtcagccttcagacactgagggtgagaactcgggtgcaaagccccagggctgtgtgtgttggggacatctggcgaagaggtggtgacaagtctcagggaagtctggcaccagcagctgcatgtggttgtccttctcgagccctttgggagcctgggcccccactgagccacgtgaccactccgggaatgatcggaattgggcacacacaggaggacagagccagagcaggccatgtgggctgcagctgtggcaggagcctcactggctcacgtttccgtcagtgcggttgcccagcgggggttggcggtttccagagctgttcccacattcaggctcccgcaagccgctccacagccctgggggaggccgagaagggggcatcccgcacggtggaatcacctgctgagggagtgggtggcagagatgagtgcagcagagacgggtgatgcgagggacttgctgtcccccagtgtctggggccctgcctattttctaggttttttagacctttgctgccttcccagtgaggggcgatcatgccacagcctgtgcggccttccttctcgaggcctctcctaggaggccgttatccttactctagaactacatggctgggtacggaaaggagagagcaaacactcactaagccctgcttttcccagaaaagatgtcagggcagcccatagggggacatagggtgacaaattagcagcagtgggtgagggataaggtcagagtgcaggagggcacagagagcagagcccggcacaaggctagtgccagccccatgccatgggcgccatggcctgctgcacgggcgggctcaccgtttccagtggccccaggagggcctgggtgctcctctgcctctcccagagcctcctggggagttggacattgttttttccccaactcctccgtggccttccagcctgtctgcccaacctgctcctggtgaccagccagctccctggagagaccccatgggagcctacatggagtctgcaacactggcagccccagggctctggctcaccttccctgtctctctccccctttgtcaccaggactctgtctacatcttccgggaaggggccttgccaccctatcggcagatgttctaccagttatgcgacttgaatgtggaagagtacgtatgggaggggccctgagacactgaggggggcccgtgggacccagggaccaaagcggtctctgaactcttccacttcacgtcggccttcatctccggcaagagcactcgcctgtctgggagtttggtgctgccgagagccctggcatgctggtggccctcgtagaggcggtgccctatagaaagccgtggctccaagctgcgcagagacagttcttactgttatgtccttgctcctcttccactgtccacataaaggccccatgaggtggttctcaatcccaggacccatcagatcccagaaaccttttatcgacttgttctcagtgatgtttaaagaattgcagggaaagggcactcactgggatgagaggagatgggaacacatcaaatacatcttgaactctgctgaaagccatggttcaccagaagcatgtgcagtggtaacacggccagcttcatgtgtgtgaggcggtccagggagcacacaggtttagggccccagctgggaacacacagcttgtgtttccagttcctctctgtagacttcgctcacggggctgcctttgatctcagtacagctctgcctctggcaaaaaccaacactggcatctcttagcagagacccgccctgggactttatgtcccaaccctctccccacccccaggttgcagaagatcattcaccgcaatgacggggcagagaattcctgcacagaacgggatgggtggtgcctccccaagaccagcgacgagctcagggacaccatgtccctcatgatccggcagaccatccgctccaagaggcctggtaagagccgcttggggtaaagggggtccaggatgcctggtgatctcctttgagacagaggtgtccctaaggggacccattcctgggaaatggcacccaggtggcatcatcttgcccctggccctggtgggaggaggacattgtgagccagagcccagcccaggtgctggcatcaccccagctgcccagaggctgcctcagccgaggccctcagccctgcggtccggggcaggagacaagcccagaggggctgggtgcagcagcctggcactgccatcggggcctccacctgacgccctcacaccagcccatgtctttcagctgtgcatgcgcaggctctgcctctgtcttcttcctgttctgtgtggcccagccccttcctggaaccaggcagccctggcaggagtgagggccagctgcagggaaagtgaagggggcaacacctgccaggctgtgggtctcacgaggctcgggggagttataagaggccccctctctcagggaactcctcccaggcttggggaggaggcatcctggacccagccacgccccacagatctgaccgaagcaggggttcttggtcttgcttggaacccagattcagccccctttgggaatctaatcaagggtgtggaccctttcccagagaaaatggtgtgttcactcctgagggtccatgggcccttgaagctgctcatggctcccctgctgcaggattcccctgggtgcccgtcaaactacagcttccctggggggcctccaccccatacttacccaccagcttcttaagagctcgagctcggacccttatagtagtaaacaggctccccagagcctggtggcctttctggggccacccggcagcctgcatgggacacccatggccttgtctcctccggccccagctctcttttccagctcagccaaggctgatggcggaaaagagcagctgacgtacgagtctggggaagacgaggaggatgaggaggaggaggaagaggaggaggaggacttcaagccatccgacggcagtgaaaacgaaatggagacagagattctggactacgtgtgacagggcccaaggctgggcctccctgacccggccagactggtgtctggcctaatgagggagccggggctccccattgccacccacagtgcccggaatggccctaggaggccctctgaggagagctagagtcccagcaaagggtgcagctgaccctagcactggctgtgacatgctgcttggtgctgcctctggtcctgaggggttagggacatccccaaagggtataccctggctctgccacccatgaaccagcccagcatccagccagtgagtgggcacccaatgcctctcaggatgagaccagtaaatgccggaggtggagctgggcagctgtggagccccaggccacaggccagtctcgcttggctctcatgactgtggtggtggagatagcgtggggagcctcgcccatggtctcacgtggcaagaagtgcctttagctctggatcccaaccgtttggcacagctttggccacagccaggcccctctggaattgtccttattaaaccagtttcccgagaagt

SEQ ID NO: 12753 - DNA, 153 bp, Homo sapiens
tttgtaggaattactctttattccaatattataataatcctcgctctataatcataacctaagaaaaaccaggtcatacagagataggagctgaggggacatggtgagaagtgaccagaagacaagagtgcgagccttctgttatgcccagac

SEQ ID NO: 12754 - DNA, 118 bp, Homo sapiens
aaagtatgaggctgggcacggtggctcatgcctgtaatcccagcactttgggaggctgaggcgggcagatcacttgagctcaggagtttgagaccagcctggccaacatggtgaaacc

SEQ ID NO: 12755 - DNA, 5266 bp, Homo sapiens
tgttaatacactggtcccatcagtttcgcatcgtactaggtgctcggtcaagatcatgataaaccgctggaaagggagaagaagttaaggtagtactacagacagaatcttatactttggaaaaaaattcatgacaaagaaaccccaaagtattgcctgttccaccctgtctttgtggtgtgtgtgcctagcttccattattcatgaagtcaacctagaagggcagactggtaataacatgagttggtacattcttcctggcaatacataaagacctttaatgtcttaaattacttatcctagtaatattacttcctggaatctattctaacgaagtaatcagaaattttaacaggaatctatgcattaaaatgttcatggaaggaaaatgatcagcaatgaggaataattaaacgagacatatataaaaaaagcaacccacaattttttttcaagcatggagaaatgctcatgcgagaatactaagtaaacagcagagaaactcagacatacatggttgcctctgagtagtgaacttttatttccttcctaaatttttgtatttttaatctcttctataaatgaatgtgtattccttttacaatgaaaaataacatttttaaaaactaaaactaaagaaatgtattgtttccttttatgtataaatgtcccaagccaagatacctgaaatataacgaggaaaagattcttttgttcactctgagcagattccactttttcctgaagtcgttctatttgttcctcaagaaccccgtctttcctgtcactgcttctgtcgtcatcatcacttcgctatagaaggcaaatgatcaaaaggaaaataccatttagattccagtgtgttaaatctcctccaggggaagcattttactgtgtctggccaaatgttaagacttatattctatagtgaaagtacccccccaccccgccacccacacatatatacctcaaagtcctgttgtggttcagagacactgtcttctcattcagaaattccatgggttcttatctaggccagggaaatttagtggcacttgtcttggtaacaacatggggggacttggctacaatttatcactatttgaccatttgagcagtaacaacagggagacagcttgctaatcattcatctgctaatgggccatacagaaaaactgggcaagtcctatgggccaaggctgctcattcttgttataatttagaaatggctccagccgacatataataattcaaagtgggctgtttaagactttctgctggcaatgatgggctcaatatactcctgtaaagctttaataatccctgcccccagctcactctgaagagtttatagaatttaattttttctttttaaaggaaaagaaaaacaaggcatggtttatttccattttacagagaaaaaaggctgagaggttagatgactttcccagcatcacccagtcagaaagtggcagagccagaacgtggctctaaggtgttacataccaaggtactttcagcaagaaggtggcatcactgaatctagaaagcctggtaattcttcgaggttaatacttaactgctaaggccccatctactgatctctccactttaagcaaaattatcagaaccctgctctcggatatcacagaatcttgcttttctctctataaacacagcccatttatgaggtctgctctatgttctagacacgtgggtacacgactgtcctttcctaacaccactcaaaggtaaggttctagagcactactacctaatagatagacctttcttcaatgggtacaatgttatctaaatatgtgcagcctgttacgacagcaaccacacgttactactgagcacctgaaatatggttgtgtgaccaaagaacctgatgttaaattgtatttaactaaaatagtcacgtgcagctagtggctactgtgttggacagcacacttctagaaacagtgtggcatgaaaaaaagtctctggagtctgacagacctgtgtcagaacctagctctggtcatttaccagctatgcaacctactagctatgttacttaacttctctatgtctcactttataacatctacaaaatgagatgacaccatttaccttacagtatttcaggtctgagtgtttatatccatatatgtttacaggtatgtcaacatggagactggtactcaaacttgcgaaaggttcctatagggcactaaactcaactttttttcaccttctactatggtaaatatgcatagcactgaaaatactttcataatgaatagtagtatcatgttaagtcactcactgcttccctccaaaatggctaaaatactaaattaatactatgagaagtattccgttaacttgggaatgactgccccattcctcctcacagtacggggaaagtgttaagtatctatagtcctctccctcttcccccagagactcctacagaaatacaagtgtcctcttcccttctgctacttcccttgtgcaaacgtgaggccgacccagagatagtgaactatgggaagtgaagtttgtggcttcctgaactggttcatcatgcagtgtaacagcacacaacacactacctgctccttcctcctcttctgcttctgcattaaattgggctcagaaaaatttctgctctgcattaatttgggctcagaaaaaatgaaatatcatcaagataatgaactctgaatcctctccagagtttctggtatattttctttaactacttacaagtttacacaaaacttacccgtttgtgttgcctagcaagtttctctttagcttcttccagctctttctggatcttcaggacatgtttgttcatcttacgaattgtagagtgcaaaatttcccaaacaaacaatcttaaagaaatatggcatttggttactgtatgtcaagctatggttacagaaaataaaatctttcaacttttgtaatttcattcttaacagctgatacagccttctgtccttggggctgaattagtcatctttctccagcaatacttacaaattggtcttttattgtaaattgtgcaagtatctatcttcacacccattagattcaggcgagccccctgagggcagcactgtgtagtcatttttcttatttccatcccttaccagaggtacatacttactgaattgaaatggcaaactatgatggacattaacattaaaaatggaaatacatttttcctctcctaaatgtaaacattatgtgtagaaattttctcaaaatggtgacctaacctgagacttatttcccatgctttatattatttaactagcacacactcagccaattattctcttggaatgtttaagaaactcattagttgataataggtatcaactgatgggctctaagaatgagataattatatgtcagctttcttactagcaaatacatactaagatcactttgtaggtgctttgaaatgtttgttgcataagtgtttttcttttaaaaagtaacttctcagctacttttgtgtctataaactaggtctcctaacccagcacagaatagtacagttggcccttgaacaatacaggtttgaactgtgcaggtccatttacacatgggttttcttccacctgagtcaataagaccaacccctcctcttcctcagcctactcaatgtgaagataatgaagatgacctttatgatgatccactctcacttcatgaatgtttcctctcttatgatttattgtaagaatacaggatataacacatacaacacaaatatgtgttaattgactacgttatcactaaggcttctggtcaacagtaggctactagttaaattttccatgcagttaaaagttctatgcagatttttgactgtgtggggtggggtgggtggggcgaagtcggtgtctctaacccctgttgttgttcaagggtgaactgtacttccttctacaaattttgacccaaataatagtttaagtggaagataataaaacaatctgttcataaaactccaagtctagaatgttaggaaacaggacaaaagagcagagcactttaactctggagggggtggactatagtcagggaaaggtttgcagagttacaaatatttgagctaggtgttaaagaacagatggagctgttgagcactatacagattccagaatgcctgggtttgaatgctggctctgcacttagttgtgtgactttgggcaggataaagcactctgtgacacttccctattctgtaaaatgtggacaataatggaaccttctctacggtgatgcggtaaggataaaatgaattgaaaacgtaaatcactcaggacaatggttaaaacatactcgggtggttagttttctgagagtttacaaatctgaaaaggttcttctgttgtctttgtttatgaaggccaacctggccggtatgacaaccttagatcacaccctatcaccctaacaattcagtatatttctgatcagtgtcctctggcagtaacagatacagtggaaaagttaaaggttgtgatggacttttatgtttttacaagtaatttgctttagtttcctgctttgtgtcaactcctgctgccctggtcctatcagctgtaaagtccgtgaacttcataaataagaaccaaacagcaaaaactttctttccgttagggggaatgagggcagaatgaatcttctgcattaaacctaagattatgactgtggtgagaacccctttcccccatccctcaggtgtcttgttaatcaccaagctttcctggatccctccatgatttactctactttgactttgatttctcctacttcctggtgtgcattctaggtgccatccccactgaagctggaacccttcccgagttccatctggactagctgagactctgcacatagctggctcttgctagttttctctcccaacagtctggatccttcaacaggatttctacttcactggcttagccttgattcaacttaagagtgtccctgctaagagacgctgcaacctgataggctgtgtatgtttccactgtctaggaatttttgccatgtccaatcctaccagattggaccattagtatattaatatcaacctggtttggaccagaatttgaagcttatgtataagagaccacacatatatcaattcttagggaacacaagtttcataaaataatttatattacctggtaaagtcacgagatagttctgaagagaagatccaatttgctacggcagc

SEQ ID NO: 12756 - DNA, 884 bp, Homo sapiens
ttcagggactggatggagagaagggaaaggcatccatttattcaggtattatttttttccctttttaatgatgaaggaagttgagaccaggagagggaagtaacttattccaagttacgaataagtcacaaaactgggagtaaaagctgggtctcccaatatcctccttcaattctgtctggtctttactttctttaaaaaactcttcactgcttattgcaagagccagagactccttttattgtgaatgccagaagggctctccagtcgtccggaccaacctccatctgctgcttgaactcctctgccacttcttgccaaatttgaacatttccatcatgtttttggaaagcactttctattcatttaaatattcggcagcatgtactgagtgctgtgtgccaagcacaagaatcagaagtaaagacacagtataacaggaaccaagatatacaatgtttgagaactactgtttgagaaatatgaagtattagagatgccctggcagctctctgaggtatgagaggcataaagaatgaagtggtcagaccttcccaggtggcaactaacaggtcagctgaattttaaacaacaaaaaggtagaggatgggaaggtggggggcattgggagtaaagaccctctaagggtaagcttttccttggtcacttgggggcactcaggctacctggaatggtagtaacatggcaaagggatggcttgttggagatgtcaagagacgacctcctgatgggaccatctcccaatgtggagcacccaggcactggagccacattgccaattcaaatcccggtcctgcccacggattgtgggtaatgttaattacctacttccctagacttctgtttccttcttgtaaagtgtg

SEQ ID NO: 12757 - DNA, 250 bp, Homo sapiens; identical to SEQ ID NO: 8032

SEQ ID NO: 12758 - DNA, 326 bp, Homo sapiens; identical to SEQ ID NO: 8033

SEQ ID NO: 12759 - DNA, 321 bp, Homo sapiens; identical to SEQ ID NO: 8034

SEQ ID NO: 12760 - DNA, 318 bp, Homo sapiens; identical to SEQ ID NO: 8035

SEQ ID NO: 12761 - DNA, 270 bp, Homo sapiens; identical to SEQ ID NO: 8036

SEQ ID NO: 12762 - DNA, 248 bp, Homo sapiens; identical to SEQ ID NO: 8037

SEQ ID NO: 12763 - DNA, 284 bp, Homo sapiens; identical to SEQ ID NO: 8038

SEQ ID NO: 12764 - DNA, 33 bp, Homo sapiens; identical to SEQ ID NO: 11248

SEQ ID NO: 12765 - DNA, 1836 bp, Homo sapiens
catttgtccatatctataagactttacttctgggttctctattctgttctgtttatttatatgtctgtctttaggacagtactacacagttttgattcccctgttgtaggggaatcttgttttattgtgcttcactttattacgctttgcagataatgcattgtttacaaatggaaggtttgtggtaaccttgcatcaagcaagtctattggcaccatttttccaatagcatatgctcactttgtgttcttatgccataatttggtaattcttgcaatgttttcagtttttttcctcctcctcctccttttccttccttttatcctcctcctcctccttcctccttcctcctccgtcctcctcctcttcctcttcctcttcctcctcctcttctccttctcctccttcttttccttcttcttctttctgggacagggtctcattcttctgcccaggttggagtataccggcacgatcatagcccgctgtagactcaaactcctgacctcaagcaatcctcccttcttggcctcccaaagtgctgggattagaggcatgagccactgcacctggccagtttttcattattcttatatatgttatgggaatgtgactagtgatctttgaagatactattgtaactgttttgggggcaccataagccatacccatgtaagacttgaactgtgtattccagtgaaaggaagagctgcatgtctgtcactttaaattaaaagctagaaatgattaagtgctgtgaggaaagcatgtcaaaagctgggtgagttaggtcaaaagttaggcctcttgtaccaagtagttagccagcttgtgagtgtgaaggaaaatttcttgcaggaaactaaatgtgctccttcagtgaacagtcgaatgttaagaaagcgacacagggttattgctaatatggagaaagtttagtggtctgggtagatcaaaccagccacaattttcccttgagccaaagcctaatccagagcaaggccctaaatctcttcaattctttgaaggctgagaggagtgaggaaactgcagaagaaatgtttgaagctagcagaggttgtttcatgatatttgaagaaagaagctaccattataatatgaaagtgcaaggtgaagcagcaagtgctgacgtagaagctgcagcaagttatccagaagctctagctaagatcattgagaaaggtggctacactaaacaacagattttcaatgtaaaccaaacagctttctaatggtgaagataccatccaggatgaggagtcaatgcctagcttcaaatcttcaaaggacaggatggctttcttgttaagggccactgctcatttaccattctgaaaatcctaggttccttaagaattatgctaattttactctgcttgtagtgtagaagtggaagagcaaagcttggatgacagcacatctgtttactgcatggcttactgaatagtttaaacccactgttgagccctactgctcagaaaaaaaagactcctttaaaaatattactgctctggctcacgcctgtaatcccagcactttgggaggccgaggcgggtggatcatgaggtcaggagatcgagaccatcctggctaacaaggtgaaaccccatctctactaaaaatacaaaaaattagccgggcgcggtggcgggcgcctgtagtcccagctactcgggaggctgaggcaggagaatggcgtgaacctgggaagcggagctttcagtgagccgagattgcgccactgcggtccgcagtccggcctgggcgacagagcaagactccgtctcaaaaaaaaaaaaaaaaaaaaaaatatta

SEQ ID NO: 12766 - DNA, 296 bp, Homo sapiens; identical to SEQ ID NO: 8040

SEQ ID NO: 12767 - DNA, 295 bp, Homo sapiens; identical to SEQ ID NO: 8041

SEQ ID NO: 12768 - DNA, 433 bp, Homo sapiens
tttttaattttttttttttttttttttttggtagagactgggtcttactttatttcccaggctagtctcgaactcctgtcttcaagggatcctcccatcctgacctcccaaagtgttgggattacacatgtgagccactggacctggtcccctttcataattgaatatgaatgtttaacaaatagatttgctgctcgggctgatttaaatctaatacggttaaagatgtatgactaaaatacaaggttgttaaataatactttgtatataggtaatatattcctgtgtactaattgtttttattgtggcaaaaaaacttttacacataacataaaactcaccctccaatagtttccaaatgtacagtatacttttgccaaccacatgcatgttgttatgaaacagttccccagaactccttccacccaccctg

SEQ ID NO: 12769 - DNA, 9951 bp, Homo sapiens
agttccgagactactgtgctatctgcttaagatgggagtggcctgggtctccaaaagcattggaaaagtgcaatttagaagctgctttctttgaaggtcattttttgaaagtgctgttcgacagaatgggaagaattcttgatcaggtaatacattttaaaatactaattttcatatttttttttgccattcaccacagaatcatctcaagtcttagtagatcttcaataaagtacttttattgttttcttactttttccactggatgactttttcatgaagcttgattgccaacaactggcagatttctgatgcattctgtatgttaaaaacatttatttggcctgacagctgcttgtttattttacttctcatgataggccattgtcttaatatccttaacacattttggagatgattaggactgcttttcttttatgacttgcttagccttttagttagtacatttagtacaaatacagatgctcaatttggaagaccttaaatgtcatttcagattgaatcttgaacactggtctcagtaaaatcacagaatagtgttagatgaacctggctctttagacaaagcttgtaaacgatactcattttcataagggagaggtgaaatagaaaaggttaatgtactcctttaaaggtggataaaaatcaccatcagctgataagttgctatgtacatctcatctgactgttaggagaaataaatttgggattatggaatccctccttccatctctcattggctcataagcttagtgatgagagagctttgaaatgcttgactcattagaatctaaacctgaaagaacacaactagcatagtactttcctcagtgtggaaactgagtggaccaatttggaattaattttcaactgtatgttaaagtacgtgttctttttttagcattttagttaaatatttatgtgagcatagggagttgtaaaagaaatttactaagtaggctgtcttcagtaactagaaagtcaaataaagaaattgtaatctaagaagtatttcactatgttagagtttagtcagcgttgtttctgacggtaatctctataagagaccaggtccttttttttttcttttttaacctcttaatagcattcgctgtatttctagtgttgcttggttggtcgttttaaacctgacaaccaaagtataaaaatctggctattaataggtattgtggcctcacctcatggctgtgtaaacctcctgggtagccaggatgcatcagtttattgtggtttgttttttgtttttgtttttgagccagtttgctaggcgtagtttaaatcaagcttgttgcttgattaagctaacaagcaagaggtaataacaatgagtatcaagacagtaatgtttaggaattttgaccgaaagtactaaaaaggaatctaaattttaaaaagtagtttctgaattgaaagatctaccctgaatcttcaaccttgagcactttttctctagtttgtggagtgctggcacaaaaggatacattgaaaacagaatatctgaaatacttaaaatacttttcaatttcaccagatagcacttcatagcacagcgctgattcatagactgtttcagtcattcttcctgtaaccgtgtatcataggcaagagagatttctagtattattttacaaatgaggaatctttggtttcagttatgtgacttacagctggtaagctatggagccccgtctgaaaccttttatctttaaaactcttgagccgggtgcaactgtagtcccagctactcaggagtctgaggcaggaggattgcttgaccccaggagttcaaggctgtagggcgctatgattgtgcctaaggatagccactgcacactagcctaggcaacatagtgagaccccgtctctaaaacaaaattaaaacacaaacaaaaaaaaaacccttgattttcaaagccttttgggtaagaacgtggtatagtctgatctcagagataaaacacaagtcctagaaagctaagcatttttggcctagttttactttctttcctaaacatttttgccggaagtgatacttgcttgtagtttcttttttttctttctctccctatttcttcttcttttttttttttctgagaccgagtctcgctctgtcacccaggctggaatgcagtggtgtgatcttggctcattgcaacctctccctcccggctcaagcgattctcccgtctcagcgtcctgagtagctgggatcacaggtgcacaccaccacgcctggcaaatttttgtatttttaatagagatggggtttcaccatattgctcaggctggtcttgaactcctgacctcaggtgatccacctgcctcggcctcccaaagtcctgggattacaggcatgaaccaccacgcctggccttcttctttcttcttttttctttttcttttgtttttctctttgcagggcattttcttagtatagattcctaatagggtctaggtaacttgactgagattaaaaatttaatatgaatagtttggcaagtggctaatgtcttcatgcataattgagaacttacagtatcaagtattcataacactattgtgttatcacaatgctaatttgaaaaaattcataatacaaacatttactattgtttgtaacggtggtgattttaaaaagatagtaaaatactaaagcccatagcagaatgtaaagaacactgggaacattgtaaggaggccaaatcttgtccctgccctgagcatgatgagtttgaatttgatcaagtaacttagctacttgtcacattttctaattgttaaagtgaagttgatattacttttttaagtcaaagtttattatctcaaaatttgagttcagtccaaaaacatgggccaagtccatttgtcatgtcagagaaatctggcttgctttcctttcaggtaaatactgtataaagtataaaataaagggacctcaagtaatagatataaacacttaactaccaacaacttccaaaaaggctagcttgttttaaagttattaccaataggaagtagagaccatttcagagtacagtgaaacaagtttatcttgttgaaatttattttcatttttactacgttgagaaataatctgtgtcagccttaaatttcttaagcaacctatgacctacatttatgttaaaataaactacaaaccaaggtaacaccacacagagaaaatacaaagtctaaatagtaatgtatttgtttaaagccaaattgtactgatttatttatttaagcacctgcagatggcgaaatttagtgacctaaaaatcttaactacctgcagtgaagagtcatgtacaattctggacttaagttgtattttaaattttttctactttttttttttttttactaaatgcattcttttaaattattttttgtaaatgattccttcatacctaaaatacaatttaatgtgaattcattgtttattatgagttgagtctcagagaaggctattctgttgcaaatattatcaagggaggaggaatggagagaagttggttaatgagtccaaaagtacagttagaagaaataagttctagtattcagtagtacagtagggaaattagttaacaaaaacgtattgtatatttcaaaggagctagaagagaactgtgatgttcccaacacgaagaaaagataaatgctggaggtgatggatgtcccagttaccctaatttggtcattacacattacacattgtgaaatgtatcaaaatatcacatggaccccccccaaaataggtacaattatgctatatcaataaaaaatacccaaagcccccaagtattaccaagtaggagaatttactcttaaactatcctttactgggaatacatatttcctttcaattaccttgcttacagctaggttttgaaaaaaaataataaatgacttggagcagtttttaattctttaaaaaaatccatgttcatgaatctagtagtaagttagaaagactaaaatgggccttacagcataggacttgagagtttctgtttatgtaacaaaacatgttcatcgtagcgtctgtagctgtggtgattttcaaaagatagtaaaatgccgaagtctgtagcagaactggcgtgtgcccgagcattctccactgaatgccagagattgacttcctcattgctattcactgtgatcaaggctttgcaggttgttcagtggctgagagtgaaacattccgctgtgctggctgatgttgcacttggtcctgactccctcttccctccactgtgctgcagtgtctgtctcactcttgccacctgggttctctgcagcctcctcactgtagttagttttgttgcaaccaatccgtttcctttggctgcttagaagaagcaaactggaaggggtgagaagtttctattgaaagttctgagcaagtagtagcaactccttgtgtagtgtgccttttgctttgttgacatgactctgtaaagcccctttctgtgaagaataaacagacaattagaattcaagtaaaatcacgatattacatgtaaaacaagtgtgaggaactgtacacagatatacagttgtttggagaaagttaatactcatgcaagaaatgagatgatccctctctgtaatcaccattttgaaccttctcatccactttgaggcatagggtcgtcatcagttctatccccaagtactttcatttcattctggtgacaaggttctgtgattcgactttattttactgtatgtgtttttgggaattggcagtagttgaataatctgaggtgaggaatatcacttctaaaattactatatttaaaaaggtgtaatatcttcccatcttgttttttggtcttatgctcaatgggtcctctgtaattaatattatatatgacacactggtgcttttttatgaccccttgaacaatttcattaattgaatcaacctgcataaaataaacattctgactctgtcacatatttgtctttatatgtttatatattttttaaatctttaaagttttaggcctgcaatatatgtaatttgagatgatgagagctagtttagttgtagatattttcattgcagaagagcatgcgcagcagggaggaagatggtggattctgctttctttttttttgtttgagacagagtttcgctcttgttgcccaggctggagtgcagtggcgtgatctcggcccactgcaacctccacctcctgggttcaagcagttctcttgcctcagcctcccaagtagctgggattacaggcatgtgccaccacaccgggctaattttgtattttgagtagagacggggtttctccatgttggtcaggctggtctcgaactcccaacctcaggtgatccgcccgcctcagcctcccaaagtactgggattacaggtgtgagccactgggcctggccagattctcctttcttaaaagaacaaattgaaatagtaaattaagcacaccggtatacattatttttaaatgtctttctgttttttatctctccatagccatatgatgtaaacttacaagtaacctcagtgttatctagactttctctcttccctcatccacacatccacgagtaccttttggatccttacgtgaacctcgctcctggctgtagatctctcttctctgtaattgtcagggtgagttactagttctgttatattccctaggattgataaatctgtgcaattaatatgttaatatcattgtatgcagttagtgtcacataatgaaaaatatatctactgcttaaaagtaattattatacattctgaactactattttttcaattattttaaataatatgtaacttttattttaaagaattaggtatgagtccttggttaaagatgattatatgagtagtgaaagtttacgttctttattaaatagtagggaaggaagatttttctttttagatcctgaggttgtctgtgtagctgatttcaggaactgaagtgccttgcctctgtgatgcaggttgttggagaccttatgcttcgaatccagcgtattcaagactttactcccaagcttctgttagtcagaaagcggttacttggtttggaacctgaaggccctatgtaagttagtgttttacatttttttaatccaaaaatttcagtgaacttaatgatcggctgctatcttgaattgatttattgtctgttttttccttaccagtattgaccacatcacactgctagagggtgtgattgtgttagaagagttctgtaaggagctggcggcaatcgcatttgtaaaatatcatgcttcctccacaccataaataacatctttcatgtaactgggggaacagaactactgtgtacatttcaccaaaaaagactcagttccacccagccacaagaggataaaaagcctttttaaacgcagtattgctgtaaactggacagaaccattaagaacctattgagtggacattcttggtgaaatgttgtataatgttgttttcattggctttatcataatggttctatatatacaattgcacattgttgaatccaggatacaatcaaaggaacttcaggaaataagcatttctaatgactgtgaaaagctgcaatatttccaatgtcatgactttgatgatatttctgttatattaatgtccttttaggtagcaaggcattttgacattctctgggactcaaatgcttgtattcttttggattaataagtagcaaaaaaaaatcactaattttataactttttaaggtcagaattcttatcaaacaaaatatgaaaactgtaaatgagaaaaaaatacaattcagaaaccattgaatgaattaattataggcgataaaaatgtgtagagcaccattaactttcttcagcttttttaagaataacaatttaatatgataaattcttgattaatataatatatctatatttttaaagaaatgttcttttactcttttgtgcacatagccatgttagtgattttcttcatgtgtgggtcccagtttatttaaactgtgtcgttttcgcagcagtgttcaatttgctcaccattggtagtgtttgctaaaattgtatttttttaagctaagtaacatgtactgggttgagaacctttttcccccctctccctctcagaaaattgctttataaaattgctttataatttgattttcttactgaaacgcatggtggtgtctaggtggggaactgactgataacccttggcagcaatcaaagtgccagtggctcctcgatgtttacatttttttctattttgttcagtcttttgttttaaatgattctaaagagattaaagaaaacagagttttaaatgtcctatttacatgttaaaggatttggggaaattgggtatgtatgtgaatgggtgtacatgtaggaacctgtagttcagcaaagctgcgctgggcacagcatgcttgtacttgattgacaaaatcgtgtttgccagtccactttctatttttcctttaagtgatgctgatcactcaaataatgcttttaagctattgtttgtttttatttgacatgttaagccgcagcactttcttcttcatctttccatttactgatatttgggggaacaggctatcaaaggttccggcttgaagggaactgtcactaccccctctaggaagttattttatgtagcatgtttgcatatacgcattgtgtggcatgtgcatagaggcttgttttacacctatctgctcattttgttgtgttagcttttctggtttatttcatagtttgttcttgctatttattaagaacagaatatcaaaagattatgaatagcctcagctctagaatgcttaccactgttaaaacaacaaaaagactaaacctctaatttcatgcaaatctttgttagcttattctaagaaatttattaagtaaaacaaagaaaaaacagaagtgggagatagttattttgtgcgtaattttctttaaatcattttgaatgatgtgaaggcattcagtttgctgtatttttttaatcacttcatacaaggaaaacttcgacatttacatttctagatgtagtaacagtctactttgatatatgagtatttaaactaaggcattaagagatattagatatttcttaatgttttcatagtgctcaataggtgtagtagcaatgatattacctctgaaaccaaatactcttttatccttgattccactatgggaccttataactagtccatgaaaccaagctcagaaaagctttaactcttatatttgtgtatatgtatgctgcttctgaaaatataatttttctaagttgttgtaatgactttaatttgtaatcagctaaggcttaagatttcatttgtttctaagtttctgtttttcatcccttcttttttcttttatatttagttcagacctagagccagtagaagctctcacagtgagttcaatttgttagtgaaacattgtactgcatcaccagtttttcttaccttctgttgacagctgaatatttctgttactcagtacttgcaaaaacagtaactaaaatgcactatgctgagtggaaagcaccgtcataacaattgattgccatagcaagttccaaagtgaatttcagccttgcttcacatttgtatcaataaatatgcacattttttaaaactttctaacaatatagtctttggatttgtttttagttatgagccgcattctttacttgatagaactcagatttgtcttagcctattgccatatagtactcaccttataactatgtaactttctcgtaatgtatctgtttgtgcaatatggaagctgtgagtggattcatagctttttggtttaattgtacattattgtgtgtgtatatatgtatatatgtatatatataaggaccaaaattcttagctcgcttacactgttgctagtgtaaacattgttacacttaattttacagggcacaaattatggaattacttcataaattcatggtaatgttttcataaattattgcattaacatacaattgccatttaattatgaagtccatcagtattgacagaagacgttacagtgaagtgctaaaaccacactatatggtaattatattttgggttatgtagtaaatcaaatatgcatgtcattgtgacactttatgtgttaaaacatggtagataatcacattttctgggccctgtaaaatagtgttactgtaatactctgttttgcctcctgccttgtttacattaaacaggatatttggtaaatttttttgtattgaaagttgtgtaggttactgacagtgttaccagcgtctggaattcttggtccctccgtggagaaactcttcagatggtcattgtgtacctactctctcttcaaaggaagttgtgatcaagttcaactttttgtgctaacaatgcatgcaggactaagagggatgatctaaaaaataaataatgtaatttaaacaaaacgtcttatgtttttgtaaaattctaattgggaacattttatccaatgataaatctcaaacaatttttaactttttgcacccccagcacacaaagggatatggcaccctacaatcagtgggtctctatagtattctagggagagaacaaaaagcaatgtatctatttgtggaggagagatgtgtagcttgaaaaattcccccaggaaaacctccacttcccttcttaataatcactgcccaaaaggaaggaatgtttatgcacgtctcaaaaacaatttttttttttttgaggcagagtctcgctctgttccccaggctggaatgcaatggcatgatctcagctcactgcaacctccgccccctgggttcaagtgattctcctgccccagcctcctgagtagctgggattacaggtgcctgccaccatg

SEQ ID NO: 12770 - DNA, 9951 bp, Homo sapiens; identical to SEQ ID NO: 12769

SEQ ID NO: 12771 - DNA, 102 bp, Homo sapiens; identical to SEQ ID NO: 5404

SEQ ID NO: 12772 - DNA, 147 bp, Homo sapiens; identical to SEQ ID NO: 5241

SEQ ID NO: 12773 - DNA, 4678 bp, Homo sapiens
ctctggaaatccttgtaatcttgaaggaatggacctcaaagtaaagagtcttctcccactaccttttacatacacctcatttactcatttaaaaaatcctcagtaatctcttactttctgccctctactccatcaaaatggattaattacctttagaatattaccataggaacatatttattctcctttctttaggttgaagaaaaatagattagggaaagacattgctatttgctgtttgcttactggattatcacagttgtccactgttttttcatgttgaatctgcagtggagaacactgaaaaatacgatttttattttctctcctgattttaccattgggagaaatcaggtctgtgtaatttagatacactgattctttagcagggcaaggttcagcatatgtggcagttttactgatagtttgagccaatgaaaaagaactctgccatggaaatgtgttgtctttaaatttagtacttgtaagccctgtttcaagtaccataaagaacaagttgaacttttacatgccttatcttctggcatgcccttccaagttattctctgtactattatcttaacatttttattgtactaagagtttataaagtattttgtaacattttcagctgattttgatccttagggcaactccataaagaaggtaaaacaagtacattattataaacattttaggccaggcgtggtggctcacacctataatcccagcactttgggaggtgggtggatcatctgaggtcaggaattcgagacctggccaacatggtgaaaccccgtctctactaaaaatataaaaattagccgggcgtggtggcatgtgcctgtagtcccagctactcaggaggctgaggcaggagaatcgcttgaacgtgggaggcagaggttgcagtgaaccgagatcatgccactgcactccagcctgggcaacagaacgatactctgtctcaaaaaaaaaaaaaattagccggtcgtggtagtgcatgcctgtaatcccagctactcaggaaaatcacttgaacccaggaggtggaattttaggccatttgggaggctgaggtgggtggatcacctgaggtcaggaattcgagaccaccctggccaacatggtgaaaccccatctctactaaaaatacaaaaattagccgggcatggtggcgtgcgcctgtagtcctagcaacttgggaggctgaggcaggagaatagcttgaacccaggaggtggaagttgcagtgagccaagatcatgccactgcactccagcctgggtgacagagcaagaccctgtctctgaaaaaaagaaacaaagcccgggcatggtggctcacggctgtaatcccagcactttgaggggccgaggcaggcagatcactaagacaggagttcaagaccagcccggccaacatagtgaaaccccgtctctactaaaaatacaaaaattagccgggcatggtggcacacacctatagtcctagcaacttgggaggctgaggcaggagaatagcttgaacccgggaggtggagcttgcagtgagctgaggtcgcaccactgcactccagcaacagagtaagactccatctcaaaaaaaaataaaaataagtaaataaagattataaaaacaagaaacagaatcaggttggttaagtgtctggctgaaagtgcaacatgaagggtctctgacccaggtcctctgacttgaaggccagtgctctttctattatactataatgcttctccatattataagttgaggtttaataagatcaggctttgggtaaggaaaaggctacagtgggggttatgataagaacttgggttctctgcctatgtatcttcccttgacccccttctgttactccaagaggccatgatgtgtaaggaaaagagctcagcccagctgagctaggtaacctaactgtttcagcaagaaattgttctgagaatgatgaatgctgaaagtgagactgtgagatatttattttttttatttgtttttaagattatggcatcgtcaaagcattgtggtgtcttttttactgctgcttgctgtgcttatagctacgtattatgttgaaggagtgcatcaacaggtgagaggtcgagcaattctgtttctagtcttgcacattctctaattctctaatctcagtttcaaatgggatgaatgtgggttttatagaatttctaccctcaacattatctcataactagtatctcaaatgttttacttttaaaggcatacactaaaaatattcttgtgatgttttatggctgctgaggatttatatgtggtgtgtgtgattccttttaccttcaaagatttttttttttttaaagacagagtctcgctctgtcacccaggttggagcgcagtggtgtgatctgagctcactgcaacctctgcctcctgggttcaagcaattctcctgctgtagcctcccaagtagctgggattacaggcacctgccaccacacccagctaattttttttgtatttttgtagagatggggttttgccatgttggccaggctggtctcaaactcctgacctcaggtgatctggctgccttggcctccaaaaatgctgggattacaggccactctgcctgtaatcaaagatttaaatgtaactttcctgaaggttttccgtcacagcagcatgaatccgttaatcactgccaaagttttcttattttctctaacatacttttgtgacccatccaaataggtaggcctctcatccaaggttgatgattacgttttatttgtataaaaagacaggttcatttgcctgtagtctacatgtacaacattactgatgggaaaataggatgctttgttaacctcttttgttaaaatagcaaaacattaatgtattttaacaggaaatggttctagaatggtattttaaagcagtttactgccaatcacagaaatgactctagaatggtattttaaaacagtttactgccaatcactgaaatgactctagaatggtattttaaaacagtttactgctaatcacagagaagtttttacagttctaaatgcatttattttaaatatatctaaaattatcctcaaaattatcttattcataatttgctttttcctgtgtcctgtaaatagtaggactttaaaagtttagaaacaaggcttttattaaaggtttagaaataagacctttattccagttagattaatttttttgtcatctttgccattgtgtattaaagaaattaggcctcttcaatgggtttttaatcttattagttttttcctatttgaaacttactttagttgatttaattttgatgatggtttataaataccgcatttctgtatagagaattcacggttttcacctcatccctttttttcagtatgtgcaacgtatagagaaacagtttcttttgtatgcctactggataggcttaggaattttgtcttctgttgggcttggaacagggctgcacacctttctgctttatctggtaagaataattttattttaataagcaaaaatgatatttcctatctttttattggtgcttttatgtcagaagtaaaaattctaagatttgttttaattacctttgtgttttgtaagcattctgatcctccaatcagtgctttaagtttgacttagagttctgttttgtttttcctttagggttagtatttaaaaagcaaagagaaaaccccagttaagcaaataaggttgtttatttaaattagtttagcgtggaaggtttttcttttctttctagatttaattgcttaagcaattgttattttaataaatgaagtccatttaaatatgcaaaattccatgtgagaaatgtcttcccttacatcctctaacatcatttacatacttggatatttattttggtattcttgttgaatgtaattgatggagtattaacatgtagaactaaatgctttcttgagtcctttgaaccaaagtataaaaagtgccccttctgggctgggcgtggtggctcacgcctgtaatcccagcactttgggaggccaaggcgggcagatcatgaggtctggagatcgagaccatcctggctaacatggtgaaaccctgtctctactaaaaatacaaaaaattagccggacgtggtggcgggtgcctgtagtcccacatactcaggatgctgaggcaggagaatggcctgaacccgggaggcggagcttccagtgagtggagatggcgccactgcactccagcctgggcgacagagcaagactctgtctcaaaaaaaaaaaaaaaaaaaaaagtgccccttctgaaaaatattcttttactagtggaaataagagagaatggccaggtgcagtggctcacacctgtaatcccagcactttgggaggccgaggcaggcggatcacaaggtcaggagatcgagaccatcctggctaacatggtgaaaccccgtctctactaaatatacaaaaaaaatcagccgagcttagtggcaggcgcctgtagtcccagctactcgggaggctgaggcaggagagtgatgtgaacctgggaggtggagcttgcagtgagccgagatcacgccactgcactccaacctgggcgacagagcaagactccgtctcaaaaaaaaaaaaagaaaaagaaaaagaaataagag

SEQ ID NO: 12774 - DNA, 280 bp, Homo sapiens; identical to SEQ ID NO: 5505

SEQ ID NO: 12775 - DNA, 190 bp, Homo sapiens; identical to SEQ ID NO: 5523

SEQ ID NO: 12776 - DNA, 2364 bp, Homo sapiens; identical to SEQ ID NO: 5525

SEQ ID NO: 12777 - DNA, 1716 bp, Homo sapiens
cctcatccccttttttcagtatgtgcaacgtatagagaaacagtttcttttgtatgcctactggataggcttaggaattttgtcttctgttgggcttggaacagggctgcacacctttctgctttatctggtaagaataattttattttaataagcaaaaatgatatttcctatctttttattggtgcttttatgtcagaagtaaaaattctaagatttgttttaattacctttgtgttttgtaagcattctgatcctccaatcagtgctttaagtttgacttagagttctgttttgtttttcctttagggttagtatttaaaaagcaaagagaaaaccccagttaagcaaataaggttgtttatttaaattagtttagcgtggaaggtttttcttttctttctagatttaattgcttaagcaattgttattttaataaatgaagtccatttaaatatgcaaaattccatgtgagaaatgtcttcccttacatcctctaacatcatttacatacttggatatttattttggtattcttgttgaatgtaattgatggagtattaacatgtagaactaaacgctttcttgagtcctttgaaccaaagtataaaaagtgccccttctgggctgggcgtggtggctcacgcctgtaatcccagcactttgggaggccaaggcgggcagatcatgaggtctggagatcgagaccatcctggctaacatggtgaaaccctgtctctactaaaaatacaaaaaattagccggacgtggtggcgggtgcctgtagtcccacatactcaggatgctgaggcaggagaatggcctgaacccgggaggcggagcttccagtgagtggagatggcgccactgcactccagcctgggcgacagagcaagactctgtctcaaaaaaaaaaaaaaaaaaaaagtgccccttctgaaaaatattcttttactagtggaaataagagagaatggccaggcgcagtggctcacacctgtaatcccagcactttgggaggccgaggcaggcggatcacaaggtcaggagatcgagaccatcctggctaacatggtgaaaccccgtctctactaaatatacaaaaaaaatcagccgagcttagtggcgggcgcctgtagtcccagctacttgggaggctgaggcaggagaatggcgtgaacccgggaggcggagcttgcagtgagccgagatttgcgccactgcacaccagcctgggcgacagagcaagactccgtctgaaaaaaaagaaagaaagaaaaggggctgatggccgtgcacccacagaaggccctggctcctggccctcccagcccttctacctgaaacctgacaataggtacaacagaaaaacttggattagagaatcaatatgtcatggaggctcatccccttttcctttatctccatgcatttgctcataatctattctttttctttctttctttcttttttttagagacaaggtctcactatgttgcccaggctggtctcgaactcctgaactaaagcaatttccttcccctccactcagccccttttccttctgatgagtttccaaattatgtattccctgctcaagaatagcagacaggctcatgcctgtaatcccagcattttgggaggccaaagtgggcgggtcacctgaggtcaggagttcaagaccagcctgaccaccatggtgaaacctcgtctcta

SEQ ID NO: 12778 - DNA, 640 bp, Homo sapiens
gggatgaaaaaggacaaatatgacagaaattttagaagtacaatcaagagtgtggtacgttattatggaggaagaaggaatgaaagataactcttggatttccttttgttttgttttaatatattttatgtgtatttaaggtatataacatgatgttataagatataaatatatatagtaaaatggttactattgtggaaaaaattaacatattctttatctcatgtagttacccatttttacgtttttactcctcatggcaagaacagctataatttactagtttagcaaaaactctgaatacaacacattgttattaactatagtcctcatagtgtatgtagagtacattggatcttttgacttgttctgcctgtatatttgctactttgtatcctttgatctacatctcctcccatctctatctctataaatgagatcttgcaacatttttctgtgtagttactggttttttactgagtgactgggtagattttgatgccattaactgtatagaaaacagttatttgttcacttgttcacatttattacatattatgtgaaagtatgtgaaaagagaaatttaaaggtatactgtaattatgctgcaagttaaatgagatcctcactttatccaggt

SEQ ID NO: 12779 - DNA, 11821 bp, Homo sapiens
aaggccaggcacggtggctcacgcctgtaatcccagcacttagggaggccgaggtgggcggatcacgaggtcaggagatcgagaccatcctggctaacacggtgaaaccccgtctgtactaaaaaatacaaaaaattagccaggcgtggtggcgggcgcttgtagtcccagatacttgggaggctaaggcaggagaatggcatgaacccaggaggcggagcttgcagtgagccgagatcgcgccactgcactccagcctgggcgacagagcgagactccatctcaaaaaaaaataaataataataataataataataaacagcttttacaaattaggaagtctaactttactgacttcatacccttgtgaagattatttcaaatccaggtgcctctttaatagttatgtaaaggaaatgagctgatcccatataataccatagaagtgatgaaaggacaaataacagtatgaaatacatcatgctcttcagaagaaaggccctatgtaaactaaaatgtattatgagatgcctttcacaggttaaagaacacaaaatcactttagtatcttctggttagaaagactccaagattagcaagcaagagacaggaacttaaagaactgtagtttgacaagtttttgcttggctagtgctgaaaaactattttaaattctgtacctttctggaatcagaaatctttccttagcttctcatttacagatatccatcctatatgccaattctccaacgggcaattgagctctggtaccatgatccagcctgtactacacctgtactcaagttgatggctgaattggttcataataggtaagcaggaggcagagcttgcaagggcacatctgccctgttatctgagagaatttgctgtatctagtgctttgggcagattgtgggaaataataagattcactactgcattttaaaattcgaaaagtttttgtgtttttgtttgtgtgaaagaatagtattcctaactacacaaaaccatagtcaactgcaggaaataagtcactttttttggtttgtttgtcttgttttttttgaggcggtgtcttgctgtctcccaggctggagtgcagtggcacagtctcggctcactgcaagctccatccccctgggttcacgccattcccctgcctcagcctccggagtagctgggactacaggcacccgccaccacacccggccgattttttgtatttttagtagagacagggtttcaccatgttagccaggatggtctcgatctcctgacctcgtgatccgcgtgcctcggcctcccaaagtgctgggattacaggcgtgagccactgcgcccatctaataagtcacttttaaaaagagtctccagtggggcatggtggctcatgcctgtaatcctagcttcttgggaggccgaagtgggcagattgcgtgaatgcagtagttctagatcagcctgggcaacatggtgaaacccacctctacaaaaaattagctgggcatggtggcacacaactgtagtcccagctactcaggaggctgaggtaggaagattgctttagcctgggaggcagaggttgcagtgagccaagattatgccattacactccagcctgggtgacagagcaagaccctgtctcaaaaaagtaaaataaaaagaatctccagatgtctactcttaggagaagtaaatttggcaaccaagattctgatttcctgcccacagataagaaattaacatctggtaatggtgccttgtccatcacatttcatggttagagacattgagaaggatatgatagatattagaataccctttcttaagaaaggtatttattagagaggttgtggcaggatcaataaaaatttacttttaaaaagtgagcaagattttcaaaacaatttaaggacagtgaaaaagaaaagtctagcaccttagctttcctagaatttcaggtatgggcattggtctctcatggcggtcctgagagaattagtaaggttttttttctttatttttattttatttatttatttagttagttatgtttgatccggagtttctctcttgtcgccaggctgaagtacagtggcgcagtcttggctcactgcaacttaacgcctcctgggttcaagcgattctcctgcctcagcctcccacatagctgggattacagacatgcgccaccacgcccggctaattttctatttttagtagagacggggtttctccgtgttggtcatgctggtcttgaactcccgacttgaggtgatccgcccacttcagcctcccagagtgttgggattgcaggcgtgagccaccaggcctagcagaattaataagttttaaaacaaccttatggagtgggtaatatttaaagaggctataacctcccaggagacttatattcaagagttactcatttataaaatagatacttgagagcacttactctttgccaaactttcctagccactatgccagacaaaatctctaccctctttgatgttacaaatggtggggaagacacacaataaaaacaagtatggaagatctttccagtgattaagtgccatgaaacaaaataaaacaaggcagtaaaatagaggggaattgaaggacaggagggtcagggaagacctctcagagaaggtaatattaactaggatctaaatgacaagaaagattctggtagccctgcaaagataaggagtcttctaaacagaaaacatctgcacgagtcctgagataggacaggcttgctgggacttgtggcaggagcctggttggtggggggaggctgtgggagcaggtcagaccagtgagcagagccagatcatctagtgccttcgcacagcagtagtgaggagtgggcatttattctcattgctgtgggaagccgctagagtgttttcagcaaaggattaaaatgatctcatttaagttttttaaaggctaccatgtgaagaatgggactaaaggcaggtaagagtagaagcagagagaatgtaagggaaaggtggatttggggtttattttagagttagatgttgatggattcagtgtggtgggggggaggaaggaggaaggactcctgggcttttgaggtcttaccaacttgaatctaataaagctcatcaaaatgtggagcagacaaaagagtcaggaacttaaaaccaagatggttacaaatggccttctctgtctggcttcttttggaccattccaagtccctatgcatcttttcttcatataaaatggtaacaatgctttggcccctctccctcagttgccactgaagccataaaggtccatgccaactaatggctgaagggctctgcattagtatcaagaggcgacgggtagaaagtatactttaatcaaggccgggcacggtggctcacgcctgtaatcccagcactttgggaggctgaggcgggcggatcacgaggtcaggagatcgagaccatcctggctaacatggtgaaatcccatctccactaaaaatacaaaaaattagctgggcgtggtggcgggcacctgtagtcccagctacttgggaggctgaagcaggagaatggtgtgaacccgagaggcagaggttgcagtgagccgaaattgcgccaccgcactctagcctgggcgacagagtaagactccatctcaaaaaaaagaaagtatactttaatcaaataaaattgagaattttcaaatagtaattttatctactgctgctttttttttcttataaatgtttttaatttgagcagcagaatctgaatctagcatgttggtcttcaatatagaagctacttcatggttaaatatctataacttggttattctcatattaggataggcaattgcttaccttaatgtaaatgcaggatcacccaaggtactcagatgagagcctcaagtaccccagtcttccaagaaaacacctctgactttttctcctcctgtgctctctgctcaggtcccagcgactccagtttgatgtctcttcccccaatggcatcttactcttccgagaaaccagcaagatgataacaatgtatggtaagtgcttcagataatcatgcctctagaagttaattccagctcagtcaccacactgtaagcagcatgtgggtctctggccagtcctggcaggagccaggacagcattcgtattgtatgctaatacatgtgcattagagtgccacctgtcaccaggggcctactggaatttgtatgcctttggagtaggaaggctgatctaaacgagcgcttctaatgtggttgaataaacatatatgacatgtctactcaggcaatcgcatcctgacactaggagaggtcccaaaggatcaggtctatgctctgaagctcaagggcatctccatctgcttctccatgctgaaggctgctctcagtgggagttacgtcaatttcggagtctttcgtctctatggagacgatgccctggacaatgctctgcagaccttcatcaagctgctcctctctattcctcacagtgatctcttggtaagccttacgctgcattgccacaatcttgttcctcatcacattcagcctttttcacctgagaccaagattgaacactgctcttgagaaactatgtaagctagctccttttgctctaactaagtcttctgttttcccacctaaaaggagctaagctatttaagatcgtctccctgcatgctggagtgcatagtgcctaagctgattttcttcctcttcctctcccacaggattaccccaagctcagccagtcttattattcactactggaagtcctgacccaggaccatatgaactttattgcaagcctggaacctcacgtcatcatgtatattctctcttccatttctgaaggacttactgcacttggtaagcacctgaggtgggtgggtgagttggtgggtttgttttttaccacttaactaaacagaaagagagaatcttgccccagtgtccaaaaagatcaccactgccttgggggtttggccataacaatagagtatataatgcacagcacatgcttatccagcacacactcactgattcccttcctaagtacaaggccctgtggaagcactgaggatacggtaattaacagcatatagtccctgtccttaaggggcttatctggtgggtagaacagacacatgaacaaacaactgcctgtttaccatacttaccacttaaacattacaataggggtgagtacaaagtgctacacaagccctcaagaatacctagactcttggttgtgaggaagtcaggatcaaggaagactggctggaagacttggcatcaaagcataaacctaaaagctggacagatgttaccctggttagccagggagggttcctagcagcagagacagcaagcacttgcacctgtaggcaagaaagaaccaggaaatccagatggctggcacactagtccagaggagttaggaatgaaatgaagctttagagataagcaggagcaaatctggagatcatgaagggggcccgcctgtaagccgtattaggctgtttgaattctgtcctgagggccgtggaagctggggaaaggtttcatgcagctagctccataagttttttcatcctagtccatatggtttctgtcaaccattttgtttctaggctaccttccaacaatttttttttttttttttttgagacggagtcgctctgtcgcccaggctggagtgcagtggcgcgatctcagctcactgcaacctctgcctcccgggttcatgccattcttctgcctcagcctcccaagtagctgggactataggcgcccgccaccatgcctggctaatttttttgtatttttagtagagacggagtttcactgtgttagccaggatagtctcaatctcctgacctcatgatccgcctggcttggcctcccaaaatactgggattacaggcatgagccaccgtgcctggcccaacaatcttagtaggtatatgtgttcagagaataaaacacatttttatattaggctgagcaaaacataagtaggaggattaagtcaactgccaaatagtgatgatatgttgcaaatacacttttggattgtcaactgtggtgaattatccatgcctctgtgcgactttgatacacatttacttctatcagtctatcagggtgcatagccgtatctagtacagtccaatcaaggtatcagcccttgctttggaagacttttttatgtcttattgaaaatacagggacctggccgggcgtggtggctcatcccagcactttgggaggctgaggcgggcagatcacaaggtcaggagctcgagaccagcctggccaatatggcaaaaccctgtctctgtacaaaaattagctcggcgtggtggtgtgtgcctgtagtcccagctactctggaggctgaggcagaagaatcacttgaacccgggaagtagaagctgtggtgagccgagatcgtgccacttctgcactccagcccgggcgacagaacgagactccgtatcaaaaaaaaaaaaaagaaagaaaaagcaagtagagggacgtttgcataaactatcagtcccgtaggaatcagagacttgtttactcttttaagggttcagcccctttgtcctttggccttacctcatcagagttctgtccacaggttgtgctgtactgttccctttgtaaagacgcatagatgagtctgcagctccccccagagatgctttggagataaacagataatacagcataccgtgttctaacaaaccataaacattcaggggctacgtcattctgggtttaattacatcccactggtaactcagagcataggctcataccccaggcttcttggattctaatcacagctcctgcaattactagcagttgatccttaggccgatacataacctctcctaattctggtttcctcatttgtaaaacagaaaacctaattcctgagttcttgagaggataaattagagataacacctataaagtacttagcacaacatctggcacaaaagaagcacttgctgaatcaaactatttgttattttgtgtgaggcagaagatgtacgtacatccacaacacattgagccgataatttcagtattctttattaccacatactcactttcaaacttagaaattgagccctactgtacaatgaggttaagaggttaacaggagtcatcttgagcaaccgccttggttgaattggccacggtaccctaatggatctcacccaaagatagtccatatttgtccaggccaccatcagcagctctgtcctacccctgcctttctttcttgcagacaccatggtatgcacaggctgctgctcctgcctggaccacattgtgacatacctcttcaagcagctgtcacgtagcaccaagaagaggaccacacccctgaaccaggagagcgaccgctttctgcacatcatgcagcagcatccagagatgatccagcaggtaagaaagtggaggcttaggaggcagtgatggggtgtccgacagaggaaggacctctgcaagacaggggagcccacacacgattaacatgacatctcatcaggttcctgctgctgagatgaagtccgtgtcttaaagttgcagtggattttgagtttgccaagtaatcactggatgtagaaaacgctcaggttctggattattcttctgagtgtcacagtgatccctatgccctggacctgtctcatgatcactatcctctttctgtgaaaattactttgctcacccactgctataaatagagcaggagttagcagcatccagctttctaaaggcttgtgttcctgtttacaaaacaggaagaagaatgcaagacagaaggaaataactggccacagagagatcaaaccatatgcttgcccttattttatttgtatgtgccttgaagtaacttacagaaatacatgctagatgaaaatagataaggaaatgggatcagtaattattgagattttagccagtcttacctttgtccacaccgttctctaaagaagcagtgaaataattcaggactccattacattcacaagatgtcataaagctgtcaactccgagtacctggaagggatcatgcaaggtggttttgcttactgtaattttgtttacgtgaccccatcccattccccacaactcagggtgacctggaaagatccattggtaagtgaagttcaaaccaattttaagaacaagaaaggaaatgaatatcttagaagaaaaggtaaccttgaaatagaagactcagatgaagcttcacaaactatttgtctgatttaccctatacagaaaaggccttcagcctaatatactcctgtatttggaatctgtcgttttatcttgggtagcaatacattaggtcactgcctgaaattctccattccattttcagatgctgtccacggtgctgaacatcatcatctttgaagactgtaggaaccagtggtctatgtcccgaccactacttggcttgatattgcttaatgaaaaggtgagagagccagctccctggtgccaacccagaagcagtggcaaccacgcacttggtatcaccaagccctgggagaaatgtgtatagaaacaccccacggtggtgaaacagggaaaatgggtcatttactgagcaagtcccatttgtgctttcagtatcacataatcatttaactgttagaagtcagcatgtgtggtagctcacagacacaggataaaggagtgtttcccctaggcagtaagagaaacctttcaaggaaataatgtacctgggtatcagaggacctaagacctaagttctagttctagctctgctataaacaagtcttgagattctggtaaaagaaaggtctggataagatgacccttttaaagtgctttacaatttaaaaattcttgatattcttagtaggatgaagccatattatcccacaagtgcttgcctgaatttcttttttaagggtccaattttagtagacattccattcctccttagagaagaacattcttcaaccctgcagatgacggagggctaatctgccttcccctgcttctctaaccttctgttccactccttgccccacagtatttttctgacctaagaaacagtattgtgaacagccagccaccggagaagcagcaggccatgcacctgtgttttgagaacctgatggaaggcatcgagcgaaatcttcttacgaaaaacagagacaggtgagtataaagcgtcctgcctagaaatctcagacaattgctatttttcaaatcaacgaaacaggcagttgctttaaagtctttgacatctgtgtttggaggccatctaaagcaatgcaatgcaatagaaaagtgagccatgttaaacaggcaaaattcattttaataatatattttatttaacccattgtatctaaaatattgtatcagtgtgtaatcagtattttaaaattgtgggttttcacattctttttgtactacatttccaaaatcctgtgtactttacatttaacagcatatctcagttcatacgttttcatcagaaatacttgatctgtatttagatttcataaatttacagttgacaaagtagattcctgtaatacccagattgtttcaaacacacctagggactttccagtaactgcattgagtatctgggctttgcaattaacttttaaattttatttaattttaattaatttaaaacaaggcattttaatttaaaattaagatgcagttggggagctgaatgttaaattgtatttaatttggattcatgttctcagtcacactggccataattcaggggcacggtagccatatgtggttagcagccgccctattggacagcatagcactgcaccacctggtcttgctgcattaagaaatgagatggcttcattggcttactgccctcacgtgtgagggcaacttcctacttctgtcagtgagatttcttttgtgctgccatgagcccaaggtagccctcagggccccagatttgaccagatctctaagccaacttttctcttagagtcttaagactgaaattaactgatctttgaaacagaacccatcaattcatacattctacttcccatgctttaaaaaaaaaaaaaaaaaaggcaaatacctttcccccccactctcctcccccaacccacatgcatcctctctgcaggttcacccagaacctgtcagcattccgtcgagaagtcaacgactcaatgaagaattccacttatggcgtgaatagcaatgacatgatgagctgacacctccttggactctacctgtacagagcagcgtccctttggtttggcccagaggggcgaacaattgcaagggagagggcctggctgatcctggctcttttctccaggggtgtggggaaaatggcaaaggtcaactagctgcttccccagggaataggggtgtgagtacactcactagggggcagggcgctgctggttcctgggggactgggtgggaagggtggtgggaggagataagagatacaaactgagactccagcctctcctcctggggccacccaagtggggagaacccctagtgtcctgccacaacctgccttgtataaacatgtacattttttcataacattttgaacaaggtttatattgactcaagtttaaaaacaaaaagtgtgactgaaaaatttttacagagtctagtgcaccaatgctgatgtgaggggttgtgtatgcgagtgaagaaaatgtgtattctggtggcctgaagctttactggacaaggatgtgtgagagtgcagagatatatttagtgacacagtagagaggcaaaaaaaaagctaaaattccaaatgtatattttttcgtattgccctgtcctcacccagaaatgatcaattcctgttactgtattaacccttgttattaggaactctaagccatgccagaacaccgtccctccccttggaccgtgtagattctgccctgggtccctagccccttgcagtgataaataactccagctaaaagtgtttggtgttcttatctccaccctctttcctactttgcttaccctcatcctcagacagatgcctcttgcttttaaaagttggatttaacgacgtgttgtagggttcttggtctgtgtgaaggcagagaccagagagaaggaagtgagcccactgctctcctgggagcaatgtgggtgagtccaccagaggccctgctgtgtgtggccaataaattttagtcttccccagccctcgaggcagtgtgtgtggatgtatgcgtgtggatatttatatatgtaccctgcactcatgaatgtatgaactggaggaagttactacagtggaagggttcttaataacaaggtctacctagcatgaagtatttaacattctcccatcccttaaaaaatatacatttttataaaatgaaaaccataataaatgttttgaatattaaaaaaaataataacctacagaggaaaattaatggagacagctatttgccttgtactttttccacaattgttgctgctagttgtacacatctctagttcagctcttgcccacgggacactcatcaattaggttttatttttatttctttcctctacccccagaaacaagcctgttaattttttttccttctcctctggcgactgtgtgatgaatcctttcttgcgtgatcaggttgcggatagacttgtaagggtgtttgctgcatacagtgtaagcattgtgaccgccaataaacttcaatggtttctactgacctgg

SEQ ID NO: 12780 - DNA, 1542 bp, Homo sapiens
ctaagaatttggctgccagaccccaggcctggctgctgctgtgtggagagggaggcggcccgcagcagaacagccaccgcacttcctcctcagcttcctctggtgcggccctgccctctcttctctggacccttttacaactgaacgcatctgggcttcgtggtttcctgttttcagcgaaatttactctgagctcccagttccatcttcatccatggccacaggccctgcctacaacgcactagggacgtccctccctgctgctgctggggaggggcaggctgctggagccgccctctgagttgcccgggatggtagtgcctctgatgccagccctggtggctgtgggctggggtgcatgggagagctgggtgcgagaacatggcgcctccagggggcgggaggagcactaggggctggggcaggaggctcctggagcgctggattcgtggcacagtctgaggccctgagagggaaatccatgcttttaagaactaattcattgttaggagatcaatcaggaattaggggccatcttacctatctcctgacattcacagtttaatagagacttcctgcctttattccctcccagggagaggctgaaggaatggaattgaaagcaccatttggagggttttgctgacacagcggggactgctcagcactccctaaaaacacaccatggaggccactggtgactgctggtgggcaggctggccctgcctgggggagtccgtggcgatgggcgctggggtggaggtgcaggagccccaggacctgcttttcaaaagacttctgcctgaccagagctcccactacatgcagtggcccagggcagaggggctgatacatggcctttttcagggggtgctcctcgcggggtggacttgggagtgtgcagtgggacagggggctgcaggggtcctgccaccaccgagcaccaacttggcccctggggtcctgcctcatgaatgaggccttccccagggctggcctgactgtgctgggggctgggttaacgttttctcagggaaccacaatgcacgaaagaggaactggggttgctaaccaggatgctgggaacaaaggcctcttgaagcccagccacagcccagctgagcatgaggcccagcccatagacggcacaggccacctggcccattccctgggcattccctgctttgcattgctgcttctcttcaccccatggaggctatgtcaccctaactatcctggaatgtgttgagagggattctgaatgatcaatatagcttggtgagacagtgccgagatagatagccatgtctgccttgggcacgggagagggaagtggcagcatgcatgctgtttcttggccttttctgttagaatacttggtgctttccaacacactttcacatgtgttgtaacttgtttgatccacccccttccctgaaaatcctgggaggttttattgctgccatttaacacagagggcaatagaggttctgaaaggtctgtgtcttgtcaaaacaagtaaacggtggaactacgactaaa

SEQ ID NO: 12781 - DNA, 5920 bp, Homo sapiens
cagacatcacggctgcagccctggctacgggtgcctgcatcgtaggaatcctctgcctccccctcatcctgctcctggtctacaagcaaaggcaggcagcctccaaccgccgtgagtattcctccctgcctggggtgggtggacggtgcgagtgacctgctccagcccccagttcagcccctgggattcgcaaaggcacgatgcaggcacaattccttttcatttgagagttgggagcagctgcacttcccgccaggagctgggcgaaatggccgagagaaaggaggcatgccatttccgggggccaagtgcccaccagcccctttggctcccaggcagtgctggctcggcactcaatacatgtcttctgaatgaatgatcatatgcagtagctcaagttgctttataaaagcaagttgctgccactcagagatccttgggggacctgtttaaggtatgggcgtgcttgttttgtaattagtagcaattgttgggacaaaaaatgatctttggaatatcagaagtggaaggggtcttacagacaacttagctcaaccctttctttttccagatgagaaggctaagatcagtggggttacataactgactgaatgttacgtaacttagtaagtggcagagctaggactcaatctcagagctttcaacgcatgctctttccgggaatagaagtccaccatataataaaaatgctctcacttactcctcattgcaagtccaagaatttggtcctaccattgtccccattttactgatgggcaaacggaggcacagaggggttaagtaacttgcctaaggaaccacacagcaaataagtggtggggctgggctttaagtcatgggcacaaacatctttcacctcccaccctggccaggtgacagtgccccttgcctagttcctgaccctgcccttgagtcttggttagtctgagtcctccaagaaggggctagggagttttttacccttgcctcccctccctggcctcttcccgtctgcctggctacagaggtaactgagaaaggattgctctggtgccaggtggcttttggctcgcaacttatttcctgtggccggcccttaacaacttgtcatccctccctcccctcattcccgggggcccccacgtgaagccccatagtgggtcactcgggggctgtggccacctcacccttgctttcagaactcccctattcctctcctagaacacaccacaacctacctgcaggaatacccatggctgggggtgggtgggggcaggtaaagggcttggaacagaagagcaacgctgggcagcagggcagggggagcaggtgttgctgtgccctccctggtggaaggctggcccagagagcctgctcaggaatgaggcactctcaggaaaaaaagaaaaggaaagggctgggagccttgaggacggcagtttgctggagaggccaacaggtgtggatttccatcctgctttggactgagcctcagtttccccagctctaaaatgggaccaacaaccctcaccccaaagggtggcacagaggatgagatgagggaatacccgtgtgcacctgcacgaagcctgacccatgagtcggctgtaagcaatagccatggtttgaatagatttcaggaacttttgggtaacttccctgtgtttgttctgttgttgtgcccctcccccaccatctgtttccccatcgtaatcagcagtaaatctccttaaaacgagaagcatctgtgggaggacatggggtgctgcatgaaagagggaagttggggtcactgcatctaattggtggccagtttggggggtggggtgtcccaaggctgaggcaagcggcagcaacttggatgagaagcagaaagtgagtgaagtggctgggaagtgatcggggacttgcaccttgtaaggtttccctgagagatgtcccctagaatgccaccctattaggcaatgtaggggataggacagagaggaccaggagccctctaattaggaactgaccttaaacactcccacccagtaagtcatggctaaagaccagaacctggcaaatgttcaaacaagagacaccagttagcaaattcaagagttgacctttgctcgatacttaaatcctgaaggtctgacactgtgtaagtcaagccataggagaaagcgctggctgcctttggtctcctgatggcagatagcgttcttacactcctggaaaatgcagatagagtttcatttatcagtcgtcaaaatgggcccctcatggaggccccatctgctggacagacacgcagatcgcttgctggacagcacccatgtgaaaagaaatggagtccggagctgtgcagggccctcctgggctcgctcctgttccctgcagggcatctgccagcaggggcagggatgttgtatggggaagccttcccttccatgaccagcttctctgtctgtctgtccctaggtgcccaggagctggtgcggatggacaggtaaggcccatggagaccttcttgagaaaacttcctgggccggctatccaggaagagatacttctgtgcagtaggggccctgtttagctgcctagagcagctggtcagaagagcctctgccatctgctgctgaagcctgcacatctgtgcagattggctgttctcctgccaccccgactcagcaggctgagctctgattctgctcagatgtgtcatgcacccaccttcgggtctcagtggtcagcctgggccaggatggggacagggaggaagcactgtctggggcagacagtgagacatgcaaaggaggccagcgggcccagccccagccacagcccttgagctgtgcctcctgcccgcagagaactccaaggagaaagctgttaggccgctgcaggccacaagggcagaggctgaggggtcccagagtggtgcagtgggctgggtctaggggcagaggggatggggactgtgtattggtgtgctctgggcaggaagctgccatgcagcctggcctggagggtgtgttcagggaacccaagttcctgccccggtacctgcaacaccaaacacaaagctcctctaggtgtttgaaagggatgatcttcaagacaggttgaaggaagtcctgcttgcaactcatctagaatctaagagttgcaggggtcttcagaagttatcccactcccaactgggaagagaagagaacccctcccctcagctcaagacaggctttggggatgttcgatcctaatgccatcaactctattgaccaaagagaaacttgtccccaaattcctgaggctgaagttctagaagtgtctgtgatttttggcttcctggctgtgcccggggttgatggtcagaccacagggaggagctggggtctgttctggtgggccctgatgccctcagctcaggacaggtgggcaggtgcagcccatggcctttgctctgtgggcctggctcctgccttcttgcttggagatgctgctgaggcttggggatggggatgtaggtgagagaaagggaggagagaaaaactgggggcagggagggcagagttcacgctccggacagcacagatgaccttccattctggttctgtggcagcaacattcaagggattgaaaaccccggctttgaagcctcaccacctgcccaggggatacccgaggccaaagtcaggcaccccctgtcctatgtggcccagcggcagccttctgagtctgggcggcatctgctttcggagcccagcacccccctgtctcctccaggccccggagacgtcttcttcccatccctgggtaagtgtttcctgaccttcacagcacgatgacctgtaaggtcatgacctcatggcctgcagggcatcggcctcactccctgccctccctgaagagttccacggcctcacggggtggggttgagggtgagggacagaggggcccccattcacctccctgaagagttccacggcctcacggggtggggttgagggtgagggacagaggggcccccattcacctccctgaagagttccacggcctcacggggtggggttgagggtgagggacagaggggcccccattcacctccctgaagagttccacggcctcacggggtggggttgagggtgaggggcagaggggccccgttcactttgcttctccttttcttgcagaccctgtccctgactctccaaactttgaggtcatctagcccagctgggggacagtgggctgttgtggctgggtctggggcaggtgcatttgagccagggctggctctgtgagtggcctccttggcctcggccctggttccctccctcctgctctgggctcagatactgtgacatcccagaagcccagcccctcaacccctctggatgctacatggggatgctggacggctcagcccctgttccaaggattttggggtgctgagattctcccctagagacctgaaattcaccagctacagatgccaaatgacttacatcttaagaagtctcagaacgtccagcccttcagcagctctcgttctgagacatgagccttgggatgtggcagcatcagtgggacaagatggacactgggccaccctcccaggcaccagacacagggcacggtggagagacttctcccccgtggccgccttggctcccccgttttgcccgaggctgctcttctgtcagacttcctctttgtaccacagtggctctggggccaggcctgcctgcccactggccatcgccaccttccccagctgcctcctaccagcagtttctctgaagatctgtcaacaggttaagtcaatctggggcttccactgcctgcattccagtccccagagcttggtggtcccgaaacgggaagtacatattggggcatggtggcctccgtgagcaaatggtgtcttgggcaatctgaggccaggacagatgttgccccacccactggagatggtgctgagggaggtgggtggggccttctgggaaggtgagtggagaggggcacctgccccccgccctccccatcccctactcccactgctcagcgcgggccattgcaagggtgccacacaatgtcttgtccaccctgggacacttctgagtatgaagcgggatgctattaaaaactacatggggaaacaggtgcaaaccctggagatggattgtaagagccagtttaaatctgcactctgctgctcctcccccacccccaccttccactccatacaatctgggcctggtggagtcttcgcttcagagccattcggccaggtgcgggtgatgttcccatctcctgcttgtgggcatgccctggctttgtttttatacacataggcaaggtgagtcctctgtggaattgtgattgaaggattttaaagcaggggaggagagtagggggcatctctgtacactctgggggtaaaacagggaaggcagtgcctgagcatggggacaggtgaggtggggctgggcagaccccctgtagcgtttagcaggatgggggccccaggtactgtggagagcatagtccagcctgggcatttgtctcctagcagcctacactggctctgctgagctgggcctgggtgctgaaagccaggatttggggctaggcgggaagatgttcgcccaattgcttggggggttggggggatggaaaaggggagcacctctaggctgcctggcagcagtgagccctgggcctgtggctacagccagggaaccccacctggacacatggccctgcttctaagccccccagttaggcccaaaggaatggtccactgagggcctcctgctctgcctgggctgggccaggggctttgaggagagggtaaacataggcccggagatggggctgacacctcgagtggccagaatatgcccaaaccccggcttctcccttgtcccta

SEQ ID NO: 12782 - DNA, 17413 bp, Homo sapiens
agctgaatggatgtgaaacccctgtgggcatgtgcttccgagttcctcagcaggcatttgtgttttttggtagaaagtttgctttttgttttttttttttttaagacaaggtctcattctgtcacccaggctagagtacagtggtgtgatcatagctcactgccgtccttgaactctcagactcacgtgagcctcctacctcagcctcctgagtagctgagactacaggcgcttgccgccacccctggctaatatttttattttttgcagagacaggggtctcactacattgcccaggctggtctcaaactcctggcctcgagcaatcctctcacagcctcccaaagtgctggtattacaggcgtgagccaccacacctaacaaaagtttgctttttatctaaaatgacccaggcattgtcactgtactgctatttttttaaaaaaattttgttgttttgttgttgttgtcgtcgttatatagatgagggcttcctgtgttgcccaggctggtttctgacgcctggcctcgcctccttatacaccaggacagcaggactgagccaccacactacccaactgcttttatctcagtgaatgaaaatgatacttgcctggaggcttcccctcatctacccccatgtttctctatttattcctcagttaagtgggcagaccaacatccacctcagcaaaaacttcttcctgacgaatcgcgccagggagcgctcagacaccttcatcaacctccgggaggtgctcaaccgcttcaagctgccgccaggagagtacattctcgtgccttccaccttcgaacccaacaaggatggggatttctgcatccgggtcttttctgaaaagaaagctgactaccagtaggcggtttggtcccttcctctccccacccttccctgtccctccccactggtctgttcctcggcccctagagggctctttcatcctctgaatgtcagttactttttctgtaacacctgcccacctcgaaggactagtgtggggatttgatggattgaggaagttctagtgttatagtaaggtaaacaatggaaaaagccactgtggatatttttggttggaaaggggtggctgtacagtgaattgcagggtctaatttcataagcgtgtctctgaattctcaagttggtactttaatgttaaactacgaatccagtctcgtcatttgaagaaagctgagcagtgctggtgtaatccttgattttccaggccacctggcctagcagagccaccaagggtgtaaggtgggaaccatctcaacggttcccacctccagaacctctccctattatagttgtcatgtcaccagctctctctccccttcctcatgggatcccacgtttgggaaccctttgtggctgacatcaccatttcctgccactgtccaggtggcctcaattcacaatggcttctgccactttgacttctgcctcaaccatgtatgttcagctgggcacttgattggcaaaggcagaatctaccctgggtgatttaagctaaagggaattcatcgaaaggccattggagactccagaactgatgggaggtagggggtcaggctaggaagaacaggagccaaggatgtgttggaggaccagggtgtgagatgaccccttggactctgggtcatgtgctgaggtctaaagatcttgtggagtgtgtctgaggtgctgggcttgggtcagccacctggcctgctggttcctgtagaggaagagccaatgggaggtagaggcagggaactgcccttgccccaagataatgcatgatgcagaaataatttcccatggcgaagggagacaaagcaatgccaggcagctgcataccaatgaatgccaccatagcacggctgtagcccccctgccactgacaggctgtcttcatttgctaaagcctaccatgggggaagggacctttcctctcagctctgaggatgcttagaggaagactggtgtgttcagtttagtcctcactgacaagaaaataggagcatgacctggtggcattagaataacagtgtcctttgtcaaactcattactctccctgccagccacaagtcactctcccagggaagcctcaacccctcaactctctctagggtgagctccctaccccaagaggacaccccacctctcaaaggtttctgacttccttgtcccaaaatattaatccttctgctccagattccaatgatcagcaccaagaggtccccttttccttctgccaggcattggccctgctgataggactcttggtcacttagttaaaatcacagtggcccaaggaagaacctcctgagcttgattaccctcactatggagcagaaggacctggccctggacacaggggcggtgcacagtataaactaaccactgcctgacctgagctttggctgaaatgacacacaggcctctgcactgcccacctctccaacctgaggcagaacaagtaggcgatgatttgcactgcatgattctcagtgtgaaagtctatgttggcaaaggatatttcaagtggaacttagaagctattccttaaggctaggacgaacaccacgctacacgcgaaggctatcctatttgataaagatcaaaaactagcaaacaaaaatctccagctgcccacgttgctttggtcatgacccttccttcagatcacttctgcctttatttttgctgtttaggggatgtgttatcacagaaacttggaatgcagagaaatgttatcacagaaacttggaatgcagaaaaatttttgctttttaggggaggtgttatcacagaaacttggaatacaaagacctccccccaccgcagccctgccccaccccacctaccccctgctggatttagcactgcacttccattttagcagtgatttccttcctttttgccctcgcctgccttccagtaacacataatttccttctatttccagagctgtcgatgatgaaatcgaggccaatcttgaagaggtatttgtaactctttgaatttcacccactctgtcctggacaatccagagagcagaggagcaaaaaaactccaagagtttttggacttcacgaacaaagcctgaaactaaggataaagccgggtactgggaatccaagagtcgactacctgcatcagctctggcctctgtgctgggggcatgggccagtcccttgcctattgggctgtgctagccactgtcaaaatccatccacaacattccagctagtctttattcttctgagtccccactagaatagatcctaaaaggccattttaattggatgctagagaagatacctctgtgagaaattagaatattactccttcccacataatttacattccttcttgtgttttaattagaaaaaaaaaaccttatattaattcttcacactatacctgatcttaacccaaatcaccgtagaatttgggccccagggaggggtagagaaggggagtgggaggtggctgccatggaagggcgggcagacacttggtgtcatgcctcgctctgatgcattctcatgtctctgcctcaccttccagttcgacatcagcgaggatgacattgatgatggattcaggagactgtttgcccagttggcaggagaggtaaatgttcccaaaaacgatgttatgcactctggttgatgcaaaggaagagacagtgtgtgtccccaaggggactttagtttaaaggggagaggaaacaaactgaacaaaagcaaagagaaattgcaaatggcacttgggttccagctcagccctcttgcgtgtgtcctccctaagacctccgcatgctgccgggggcttccatttgcatggtcagccctgactctgtgttcctccttccttaggattcctgggctcaccttgtgactgttttattttctctgttctacaccaattgaggcatgaaacttggccccttatccttgatttccacaaaggatttggagagatggaagggtttcaagtctcaagaatgcaggccacctgcaacagagtgtttgaattaggcttttctgttctcttttcttttttctttttttctttttagagacagggtctctctctgtcacccaggctggagtgcagtggcatgatcatagctcactgcagcctccacttcctgggctcaagagatcttgccaccttagtctcccaagtagctgggactataggtgcacaccaccatgtctagctaatttttattttatttttatttttgtagagatggagttttgccatgttgcccaggctgctctggaactcctgggctcaacaatcctccaaccttggtctgccaaagtgttgggattacagatgcataccaccatgcccagctaatttttaaattttttttagagacagggtctcactttgttgtccaggctggtcttaaacccctgagctcaagcagtcctcccacctcagcctcccaaagtgctggaattacgggtgtgagccaccatacctggccacttccctgttcttaaaaaaatccctcagccatttagtcccatcacaaagttatttagccctctttcttcccaacaactccaaaaaaaaaaaaaaagtcctctttcttcactatgtggaggaactttccaatcattgagctcatctggtactcccttcgctgacctaaagacccatcaaagtactaagccaggcatcgtctgctctgcgcctccaccggcctctcaccctctgctccctcccagattcccaaggaaaggggccatgagagtcttctttcccctctgattgaatcccacacatacacaccccaaaaggcaaacatgactgcaatcaatcttggttttaaacaaaggagtttatccatgagttacacaaatatgtgtaagtggatagagacatctgagcccatgaggggccctggcatgatgggcatagaggagggccggctaggtcttggagacagctggttttcaccagttttacaggaagtctgagctttgagttttaaagaatgaagaaaacatgccagataagaggaatggtataagagaattaagaaagaccacaaacatgggtagaggggagtatttattatttatattctctacagcaaagaaatggtgagtgaactctccctactgcatccgtacattaaaacaccgtatctaggctgggcacagtggctcacacctgtaatcccagcactttgggaggctgaggctggaggatcgtttgagcctaggagtttgaggtttcagtgagctaggatcattccactgcagtccagcccagcctgggtgttctaaaaagaaccaaaccaaaaacactgtatctaaaatccagaatggggcagtactactcaaagtgtggtctggggacagcagccccaacatggctcgggggcttgttagaaatgcacattcataggccccaccgcaggcctacctaatgcactggtgtcctgccctgtgctcatccagctcccacggggggccaataactatgctctggttatgtgtccacaggatgcggagatctctgcctttgagctgcagaccatcctgagaagggttctagcaaagcgtgagtatcccctcattgcaaaacctcatcctgctctttcccctgtggatgggagggaacatggaaatctttccccctccatgtctggctgctgtgactaaaccaccaccctccatcccctccaagaagtggatgaaggatttgtatgatgtgatgaaaaagaacaagtgtttgtagcatccacagatcaaagatcaaatccaggtttccactacatactagctttgtgtgatctatttttttaatttattttattttatttttgagacagagtctcactctgtcgcccaggctggagtaaagtggcacaatctcagctcactgcaatctctacctcccaaattcaagcgattctcctgcctcagcctcccaagtagctggaatcacaggcaagtgccaccacagccagctgacttttgtatttttagtaaagacagggtttcaccatattggccaggctggtcttgaactcctgacctcaagtgatccacctgccttggcctcccaaaatgctgggattacaggcatgcactaccacatccagctaatttttgtattttcctagagatggggtttctccatgttggccaggctggtcttgaacccctggcctcaagtgatctgcccacctcggcctcccaaagtgctgggattacaggtgtgagccaccgtgcccggccacatcttgtaactaactatttcttaagcaaaaaaatgtcagaggattgattgttcaaccccttactgtggatcaccagcagggaggagcgggaaacacaacacagagacattttttcccctcaaattatcaaaagaatcacgctgcatttgttaagagagcaactggcaatccaggaagcagagttttgaacatatcagaagttaggaatctgcatcagagacaaatgcagtcatggttgtttgctgcataccagccctagggatcatctcgagaagcctcatggacttcaagggacatcattccctctgacaagatggcctctagcctaactccatgagataaaataaatctgcctttcagagccaaagaagagtccagggccagctgggtcttccctcccagtgtgaaccaagagggctgggccagtcaggttacggtcagtccagtgcagggcctccccagaggagacccagtctgcacccgccctcctctaattttcagggaaggcaagaagattgtgtttaccctggaggccaccaggcacaagtgaggtcacagagctcttcagatatgcagtcctcatgagctgaggagactaaagcctcattgtttctgcacagatggagggtggggctgggaggtggggaagaagcgggccttgcctggattcagcccgctccttgctgggggagcagcattcgctccgcgcgtgcctctgagcttactaccctacccctagctgcctgctgactccagccttctggagggctccacaccagagtctgcatgcacagctgctgggccagagccttatgaccatctaaggggttggtgcccagagtggcagctttgaggcaggtcaggctctaacctctttcggggacataacaaaaaggctgggcttttcgtgaagtctgtggggagccaggttcacattggtgactagggagggtctcatgccacctgccaaacaccaagtggacaggactcacttagtgcagcacaaatagctcgtggatcgatcccagttcctcaggtttctcagtcagctggggacacagtccataaatgtctgcagatggacagttcaagtaaacctctttctctcacgggtcatagcctagaattaacacacctgctctctgttttctttttccctgcccaacaactacaggtgactttatatcctgtgggcacctaaggcccaaccattgatcattctgttatttatttgttcaaaaagcactttttaaagccctgtttgcccacggcaaatatacagagacatcaggacaatgtggacatcatctgcactgtcccagtctggtagtcactagccacatgtggctatttaatataatggaagtggcttctgtatgtgaagggcacagataaagaatatctccatgattgtggaaagttcagttggacatcaccgctcagagatttttcctgtcacactgattttgtcttttaggccaagatatcaagtcagatggcttcagcatcgagacatgcaaaattatggttgacatgctagatgtatcctttaatgtgctccagggaatagagactgggggagtttaaaatctcactccagaaagattcaaacacatggccttctcccttttcaaaatagccagttgttcccaacttgctgagttgctgtcggacagtcagcagcgctgacctcccttactagggaaatgcgagaaccctctgatgagggaaagcaaatgctacaccccccctcccacctaccctgaaaggcttagaatgcaggcccatggcgggcggtggctcatgcctgtaatcccagcactttggaaggccaaggtgggcctcctgactcacgaggtcaggagttcgagaccagcctgaccaacatggtgaaaccttgtctctactaaaaatacaaaaattagctgggtgtggtggcgggcacctgtaatcccagctactcaggaggctgaggcaggagaatcacttgaacctgggaggcggaggttgcagtgagctgagatcgcgccactgcactccagcctgggtgacagagcgtgactcatcgccaaaaaaaaaaaaagaaaaagaatgtaggcccaccagtccattcctggggctggtgcgggaaattcctgacaatatgcccatcacttctttgcacaaagcagctcgaatttgtttcctcagtgatgtgtttccattacttcctctaggaaaatattccctaaccacagtatttctgatgtgaatctgttttgtctgatcaagatcgtcgtcttctttatttatttatttatttattttttattattatactttaagttttagggtacatgtgcacaatgtgcaggttagttacatatgtatacatgtgccatgctggtgctttgcacccactaactcgtcatctagcattaggtatatctcccaatgccatccctcccccctccccccaccccacaacagtccccagagtgtgatgttccccttcctgtgtccatgtgttctcattgttcaattcccacctatgagtgagaatatgcggtgtttggttttttgttcttgcgatagtttactgagaatgatgatttccaatttcatccatgtccctacaaaggacatgaactcatcattttttatggctgcatagtattccatggtgtatatgagccacattttcttaatccagtctatcgttgttggacatttgggttggttccaagtctttgctattgtgaataatgccgcaataaacatacgtgtgcatgtgtctttatagcagcatgatttatagtcctttgggtatatacccagtaatgggatggctgggtcaaatgatatttctagttctagatccctgaggaatcgccacactgacttccacaatggttgaactagtttacagtcccaccaacagtgtaaaagtgttcctatttctccacatcctctccagcacctgttgtttcctgactttttaatgattgccattctaactggtgtgagatggtatctcattatggttttgatttgcatttctctgatggccagtgatggtgagcattttttcatgtgttttttggctgcataaatgtcttcttttgagaagtgtctgttcatgtcctttgcccactttttgatggggttgtttgtttttttcttgtaaatttgttggagttcattgtagattctggatattagccctttgtcagataagcaggttgcgaaaattttctcccattttgtaggttgcctgttcactctgatggtagtttcttttgctgtgcagaagctctttagtttaattagatcccatttgtcaattttggcttttgttgccattgcttttggtgttttagacatgaagtccttgcccatgcctatgtcctgaatggtaatgcctaggttttcttctagggttttgatggttttaggtctaacgtttaagtctttaatccatcttgaattgatttttgtataaggtgtaaggaagggatccagtttcagctttctacatatggctagccagttttcccagcaccatttattaaatagggaatcctttccccattgcttgtttttctcaggtttatcaaagatcagatagttgtagatacggcgttatttctgagggctctgttctgttccattgatctatatctgttttggtaccagtaccatgctgttttggttactgtagccttgtagtatagtttgaagtcaggtagtgtgatgcctccagctttgttcttttggctcaggattgacttggcgatgcgggctcttttttggttccatatgaactttaaagtagttttttccaattctgtgaagaaagtcattggtagcttgatggggatggcattgaatctgtaaattaccttgggcagtatggccattttcacaatattgattcttcctacccatgagcatggaatgttcttccatttgtttgtatcctcttttatttccttgagcagtggtttgtagttctccttgaagaaggtccttcacatcccttgtaagttggataagatcgtcttcttgatttagataagggctactttcatgaggatcctacttcccttttgctctagctccttcccaggccacccacctttccccaaggcaaactagtcatccatttcccccttgtttccaatgcttagtgagaagtggtggtaaggggcagcctaagcttctgtgaagttttttctgtttgtttgtttagttggttggttggttttttgagacggggtctcactgtgtcacccaggctggagggcagtggcatgatctcagctcactcgaacctccgcctcccaggttcaggtgattctcccccctccagcctccctagtagctaggactacaggtgcgcgccaccatgcccagctgatttttctatttttagtagagacagggtttcaccgtgttggccaggctggtgtcgaattcctgaccacaggtgatctgcccaccttggcctcccaaagtgctgggattagaggtgtgagccaccatgcctggccacttctgtgaagttttatctagtggattcatggtgtacacctgctagctcccttcaccaaaggcctcttagatatactccacatactttaaaaaaaacagcaagggcctagccactagaagccatccaaagccctctgcatgtcatccaatacctcatttttagtagtatctggggcctccacagcacccctagatcaaaacagcaaccagattcggcagggagccagcaggtctttctcgcccttcctccaatcctttaaatggaggtttagccagtgggaaaagcaggaaaaggatccttctgcaaaccctccttgtgtatatgctatgatattcaaaagatccagttgagaagacaaactaggtgacactatgtgcaaatggacccacactcaagggctttccttgactgaaggcagtcggacgggagtggcaagctggggctgaaggagttctacattctctggacgaagattcaaaaataccaagtaagatcccagagatgcgggtggatctgtgttgggaaacattctgttcatatgctttaagatgcagcaactcctgcacagagtggagaaacatttccaaggggattgggattttacccataatgaagctcagagtgagtaaagatggggctgaggaaatgcaaacaaaaaaccaaccaggacttcgcaggtgaaatggcctattcccttcctcctgattattgggatcatctaaaggccaccatcaagggtttcctgaaaagggtttttgacagctaaagtacaaaaattatataagacaagaacatggacctatgggcgttggctggctgatttgatgggcatatttacaaaccagctcacagacagaagcaaaatactattagttatttaaggcagaaacataagtgattcttccacggccaaactagaggcacagagctggaaaaacttcatccccactcagcacatactagggaggtaacttgccagctttgctttgggtcatagttcttacagctaacttatgtgttccagaaaatttaccgagaaatcgacgttgacaggtctggtaccatgaattcctatgaaatgcggaaggcattagaagaagcaggtaaccctttataactgcattttcgttcctagtttaatctgtctgtagaatatgtgaacactcatcttataccatataacacaagatttggtaaagctataaaataaagtaggtgctggtttaatacagacacctccttttcattcccctttcaaagactaattggtaaaattaaatgcagtaggatgctctgccctctgtgccttcttgaatccaagtttcctttggagccgcctggcacagtaagcaggcaaagccaggtctcaacagcctcctccaggtgcttcctttctggtgcagggttggttaggcagaaatcaaatgtctcagctcagcccttagggtaagaccctagcagaattggatatcaataaaaggacacaagcgagtggtagaccagcaaagcaggagactgctgggctttgggaacaaatgtgtcagcatgaggctgttcattctatttgctggaatataatgctgctgcagagaccccacacaacattggtttatacgaggtatgtctttctgtcgtatagcaatcccagctccagcagtccacggctaggacggtgcctcctactatcctaccatgtcactatctgatcacgcttcccccagcctccccccatccatgatgcccaccggaccttcaagggtcaccctcatccaagggacctgggacagcctgccaccacaaacacatgccaccaacaggttgacagaagaagggccccttgcctttaagggcacacaggccatttccggtcacacatcccaccagccagactctgatcacaaggcctctgttgactgcaaggaagctgggacatgcagtcttgatgctaggtggccataggctcaataaaaattattttactctggaaggagagagaactactatgagtttaccaggaaagcttctgctcacatatatccaggaagaatctgatcttcaagacgattgagagctaaacaaaaaatcaaacagcagcagcatggttaacaacatgaagcaactgtgaccatgagaacagaaacaggcaagaaaacacttatgtgtcagcaaaggacacaggcagggtgaaggtggacagttcaaaaacaaaagaaacagcagaaggtactggctttgcaaaatcaaaccagtctcacagaagagcagccaagggacaaaagcaattatacctcatttaaatcaccacattagtttcatagcctgtgagcgcagctaaatggaacaatctaatgcttagcaatgagtttgtttgttcatgtaacttcaggtttcaagatgccctgtcaactccaccaagtcatcgttgctcggtttgcagatgaccagctcatcatcgattttgataattttgttcggtgtttggttcggctggaaacgctattcagtaagtggatatttggggaatgactcatttcagttctcttggtattaaagtggcctgcctttcacctcggtgaaatcatctaaactagagacatgtcttccaggagttgagaatgaaattccctctttactaatttgagggtgaggaagaaagcatgtatggtggtcagtgaagtcagttgctgaactgaaaagaggataatgtgatctgtttcagctcactcacttgtgacaccctctttttctccctccacagagatatttaagcagctggatcccgagaatactggaacaatagagctcgaccttatctctgtgagtcagcaggccccgccttgcttctaaggggatgggggaggcatggggcggaaagggctgttacttgagtgatctgctttttcaagttttgctttaaagagctcttggtctgtcggggccaggcctgtaaccggttgtaagatcccacaatgcacttttacttgcagttgttttccaaccacctattctcaagtccaaaatgcacgcctggctccctcttctcatgagctttgacttgagtgtagctcaaggttaaactaaggagtggctgcaggatcatgcttagaaaaatgaactcctgattagcatgcaagggagaacatgtttatataaagaaatccttcagctgaaattcaagttgggttttgggaagatccatcattcttagagtggatctacttaaaatactttaagcaaattagttttctctactccctccccgtttaagataaaaccaatactagtaaatacgtttgccatttattattgttattgcactcatgtgtctggaaccctagcaatacacatctctgaaatgatcatcaatctgaattaagtgggtatgctaatttcacaaaaagcaaagcgtaaaatgttctcgtgtcatcccaatgacaggaagttctctcactgaaagaaagaagccaggtggggtatacttccattatcacctggctccagtcagcatttcctctatactcagggaaggccacagagggccgggcgaagtggctgacactgggtgagaatggcagttgtcagtcctgtccgtgtaacagaggagtgaagtggtgaggagggcaggtctaaggcactggcagctcttttccatggattttgaactctggaggaaggcagcaactaaataactgtctcattctgctattatgcattgtattagcaaagtgaaaatatagtctatctggttacaaataacactaacttgcttaaaactttacatatcctaggaaatatctctacccctagattgcaatgtagagtcaaccccatctctaaaaaaataaaaaattaggctggccgcagtggttcatgcctgtaatcccatcactttgggaggccaaggcaggtggatcacctgaggtcaggagctcaagaccagcctggccaacatggtgaaaccgcgtctctactgaaaatacaaaaattagggctgggcgcggtggctcacatctataatcctagcactttgggaggccaaggcgggcgaatcacctgaggttgggagttcgagaccagcctgagtaacatggagaaaccccatctctactaaaaatacaaaattagccaggcgtggtgacacatgcctgttaatcccagctactcgggaggctgaagcgaaaggattgcttgaacccgggaggcggaggttgcggcgagctgagattgcaccattgtactccatccagcctgggcaacaagagcaaaactgcatctaaaaaaaaaattagctgggcgtggtggcaggtgcctgtaaatacgttactctggaggctgaggcaggagaatcacatgaacctaggaggtagaggttgcagtgaactgagatggtgccactgcactccagcctaggcaacaagagcaaaaccctgtctcagaaaaaaataaataaaaaataaaaaaatgagccaggcatggtggtgcgtgcctgtagacccagctacccaggaggctaaggtgggaggaacacctgagcccagaagtcaaggccgcagtgagccatgatctccccactacattccatcttgggtgacagagcaaggccctgtctcaaaaaatttaaaatgaaataaatagtagagtcaacacaactgtgacacgaaacatgccacatgttaagttctggaaatcctagcctgtcattcttgctggatatcctattctaccccagccacccacccccactccagggtccacctggcctgcctgctcagtccactccctccgcatctcctccgagaagcatcttcttacccactggcttttcctgccactcctaagccttaccttttgcaggttcctggagatcctcgcttctcgtagtctttgcaaggatgagccatgttcagaagctctccgttcagtctgcagggatttcaaccttggctgcagattccatcacatggggagctttgccaaagtgctggtgtcctgtctgtatcccagaccagttgaatcaatctgatttaaagtttccgtatcactacaacttagaaccaatgctgaacaccattggttgcagggatatccacatcccaaactaacttctgatgtgatactctgaggcagagatgtgaaaatgctaatttctgttgtgtgaatttcacttttcatgtgtgcaatcaaccctgtaatatgattcatggccacttaatgcaaatcacacagactactgacctgttaaaagctagactctagaaatcaggtaagaaaaatatgagttagtgcactgatattgtagccctcaatcagcttttccagtacaagttttttggaacaatctacaggtacttaaatagcctttaattttaaaagtggtcactgagctgacttttttttttccttcctcacagtggctctgtttctcagtactttgaagttataactaatctgcctgaagacttctcatgatggaaaatcagccaaggactaagcttccatagaaatacactttgtatctggacctcaaaattatgggaacatttacttaaacggatgatcatagctgaaaataatgatactgtcaatttgagatagcagaagtttcacacatcaaagtaaaagatttgcatatcattatactaaatgcaaatgagtcgcttaacccttgacaaggtcaaagaaagctttaaatctgtttatagtatacactttttacttttacacactttcctgttcatagcaatattaaatcaggaaaaaaaaatgcagggaggtatttaacagctgagcaaaaacattgagtcgctctcaaaggacacgaggcccttggcagggaatatttaaagcaacttcaagtttaaaatgcagctgttgattctaccaaacaacagtccaagattaccatttcccatgagccaactgggaaacatggtatatcatgaagtaatcttgtcaaggcatctggagagtccaggagagaagactcacctctgtcgcttgggttaaacaagagacaggttttgtagaatattgattggtaatagtaaatcgttctccttacaatcaagttcttgaccctattcggccttatacatctggtcttacaaagaccaaagggatcctgcgcttgatcaactgaaccagtatgccaaaaccaggcatccaatttgtaaaccaattatgataaaggacaaaataagctgtttgccacctcaaaactttatgaacttcaccaccactagtgtctgtccatggagttagaggggacatcacttagaagttcttatagaaaggacacaagtttgtttcctggctttaccttgggaaaatgctagcaacattatagaaattttgccttgttgccttatcttcttccaaatgtactgttaaataaaaataaagggttaccccatgcaatcacaccatgccatgttttccttcctggagggcagccccacagggacggtttatgagcacacaattatagcttgtttctactttaacaaggtatgctgcctctgtaaattcatgtattcaaaggaaaaagacaccttgcctatattaaaatgtggaactataaaattttttaaaatccaa

SEQ ID NO: 12783 - DNA, 504 bp, Homo sapiens
aggaggtacgtctggcccatgtcccggggtgctcaggtcaccaaaaaagcgagaggcttagactgctggagctcagggagcgtcgtgaagcccgggcaggggctggtggtcatgaaggatgagtcctggccacccctggggccctgctgaagttgcccaggctctagatcccactggtctaagctctgggcaaggtttctggaaagtccttgtgggacccgctgcctccctgtgacctggcagagcccatacagggtttggttctgggcagaaaatccatgatcctgagactgcaggaggcttttcacaaagttctttgtcactcttaggagaagactgagtcagggaaaaggtgaaccctgcagactgtactagaagacaacgcgggagcacagaggagaccaggacccaattcccaggctgtgtgaccttggacacgttacagctcctctctgcatttcagggttttgttttttttttttttgatttttggtttgtttgttt

SEQ ID NO: 12784 - DNA, 101 bp, Homo sapiens; identical to SEQ ID NO: 6749

SEQ ID NO: 12785 - DNA, 2540 bp, Homo sapiens
gggatgttatcaagtggctggtcaaagcagtaactgaagatggattgactcagcccccaaatggaaatcaaacgtcttcaggaacaggaatcttgaaagccagcagtagccacccttcttcccagcccaacctgacaaagaacaccaatcagctgtaaggggcaggcagttctctttcctggggctcttggggtttagtgttttagagagaacaacaccaatccctaagagcagcttcccccaaattaacaagatcttagaacataggctgatgcttattcaagacttagtttaactagaggctaaatttctgatttcaaaggcagaacaaaaccaggtgctttcacccctaaaatgaataggacttcacaaagtgaatacgaagtcacaacgcagatgcaaaacaaatgctagaggacactgcccttcacttcctgcatttcaggagacagtaaagggttacagctcctcatcacttcagatatctgttgccatagagaaggagtggtgtgtagtgtgagttttgttaacctcgagtcctcaaggacctgggtttctctcctcaggtcccgggagaaaaatagcattcagcctgcaggttccaacacaccagggcaggtatcatcaccgcagactgcactggaaagaaattcatggcatttcttttatggagttgagagtggtcttggcgttttttgagagatgccgggagattaggggctggggctacccttgcacaaataacccagtattccatgtcaatcatattgtgaaaagccagtcacactgggcatttcaagtgtaacatttgtgtctgaattcacaatgttataatctggttgcaccaacctgatttttatggaagacctacaagtttaaattgtttcctaaattgtaaataattataactaatttaggaaacaattttatatctaaaggggaatgttttggaacaatgaagcatttggacagattgaggaaggccctaaagtagcattctcccacacgggccacatacagacccaagagggaggtggacactgttccttcaatggaagctagtatcatataacaatcatcataataaatgtttataaatacatgttagtagaaataacaatagggtcccctaaaagtcaattttgttatgatcttaacaacaatagtaggttgctaccacttatcactagagagtccctgtgagatattttatatagcactcacaactttacaaaatagatattattgctcaccctttttatagatgagaacacttggactcagggcagtttagtaacttgtcgaaggttaaacagcttatcattgtagagacagaatctgaggccagagctgctggtctggcccacctgttgtgttactagctgcagattttcttaaagtaaaacctttcttccatcacagataacatgtgttgccgggcgtggtggctcacgcctgtaatcccagcactttgggaggccaaggcgggtggatcatgaggtcaggagatggagaccatcctggctaacacggtgaaaccccgtctctactaaaaaaatacaaaaaaatagccgggcatggtggcgggcacctgtagtcccagctactcaggagactgaggcaggagaatggagtgaacctgggaggcggagctggcagtgagccaagatcgcgccacagcactccagcctgggcgacagagctagactccatctcaaaaaaaaaaaaaaaaaaaaaaaaaaacacgtgttagaaaaggctgatgtcaggccaggctcacctttctgagaggttgccccgactcctaatgccacatcaggctggctctctcccacagttagatctaatgggagagaaggtcaggttccaccaggggaggttctgagaccgaacttagtaagaagctattgtaaaggaaacagtaacaggagaaaactgtatggcaaatacatattttctcctgtatcaaagaaatttaaatcattttaagtcactctggacctgtttcttcatctgcaaaacagggaagttatagattagatgatccttatagttccctatatccttaaggttgtgtggttctatttttgaatttaaaagcagcttgcttttacagctcaaccccaggttctgagaggttcaaatagtatgttctggcaaaagggattcaggtaggtgaaattgctaaataaaagcatgctgatggtttgagtagttctccctgaccttgtgtgtgctttataagatcctttagtagtctctactctcgatgtacactggtggggacctcctcccagccagagagtggctccttgccagaccctcacactcatctgtgtcctatgttctggactcaggattgtgtgccagcttcagaggatgctctccatagccgtagaggtggacaggacccccacctgcagctccaataaaattgccgagatgatgtttgggtttgtgctggacattcctgagaggagccagaggtgagtcttgattttgttggggagagcagttatttaaaaaaaaaacaaaaaaaa

SEQ ID NO: 12786 - DNA, 2540 bp, Homo sapiens
gggatgttatcaagtggctggtcaaagcagtaactgaagatggattgactcagcccccaaatggaaatcaaacgtcttcaggaacaggaatcttgaaagccagcagtagccacccttcttcccagcccaacctgacaaagaacaccaatcagctgtaaggggcaggcagttctctttcctggggctcttggggtttagtgttttagagagaacaacaccaatccctaagagcagcttcccccaaattaacaagatcttagaacataggctgatgcttattcaagacttagtttaactagaggctaaatttctgatttcaaaggcagaacaaaaccaggtgctttcacccctaaaatgaataggacttcacaaagtgaatacgaagtcacaacgcagatgcaaaacaaatgctagaggacactgcccttcacttcctgcatttcaggagacagtaaagggttacagctcctcatcacttcagatatctgttgccatagagaaggagtggtgtgtagtgtgagttttgttaacctcgagtcctcaaggacctgggtttctctcctcaggtcccgggagaaaaatagcattcagcctgcaggttccaacacaccagggcaggtatcatcaccgcagactgcactggaaagaaattcatggcatttcttttatggagttgagagtggtcttggcgttttttgagagatgccgggagattaggggctggggctacccttgcacaaataacccagtattccatgtcaatcatattgtgaaaagccagtcacactgggcatttcaaatgtaacatttgtgtctgaattcacaatgttataatctggttgcaccaacctgatttttatggaagacctacaagtttaaattgtttcctaaattgtaaataattataactaatttaggaaacaattttatatctaaaggggaatgttttggaacaatgaagcatttggacagattgaggaaggccctaaagtagcattctcccacacgggccacatacagacccaagagggaggtggacactgttccttcaatggaagctagtatcatataacaatcatcataataaatgtttataaatacatgttagtagaaataacaatagggtcccctaaaagtcaattttgttatgatcttaacaacaatagtaggttgctaccacttatcactagagagtccctgtgagatatttcatatagcactcacaactttacaaaatagatattattgctcaccctttttatagatgagaacacttggactcagggcagtttagtaacttgtcgaaggttaaacagcttatcattgtagagacagaatctgaggccagagctgctggtctggcccacctgttgtgttactagctgcagattttcttaaagtaaaacctttcttccatcacagataacatgtgttgccgggcgtggtggctcacgcctgtaatcccagcactttgggaggccaaggcgggtggatcatgaggtcaggagatggagaccatcctggctaacacggtgaaaccccgtctctactaaaaaaatacaaaaaaatagccgggcatggtggcgggcacctgtagtcccagctactcaggagactgaggcaggagaatggagtgaacctgggaggcggagctggcagtgagccaagatcgcgccacagcactccagcctgggcgacagagctagactccatctcaaaaaataaaaataaaaaaaaaaaaaacacgtgttagaaaaggctgatgtcaggccaggctcacctttctgagaggttgccccgactcctaatgccacatcaggctggctctctcccacagttagatctaatgggagagaaggtcaggttccaccaggggaggttctgagaccgaacttagtaagaagctattgtaaaggaaacagtaacaggagaaaactgtatggcaaatacatattttctcctgtatcaaagaaatttaaatcattttaagtcactctggacctgtttcttcatctgcaaaacagggaagttatagattagatgatccttatagttccctatatccttaaggttgtgtggttctatttttgaatttaaaagcagcttgcttttacagctcaaccccaggttctgagaggttcaaatagtatgttctggcaaaagggattcaggtaggtgaaattgctaaataaaagcatgctgatggtttgagtagttctccctgaccttgtgtgtgctttataagatcctttagtagtctctactctcgatgtacactggtggggacctcctcccagccagagagtggctccttgccagaccctcacactcatctgtgtcctatgttctggactcaggattgtgtgccagcttcagaggatgctctccatagccgtagaggtggacaggacccccacctgcagctccaataaaattgccgagatgatgtttgggtttgtgctggacattcctgagaggagccagaggtgagtcttgattttgttggggagagcagttatttaaaaaaaaaacaaaaaaaa

SEQ ID NO: 12787 - DNA, 401 bp, Homo sapiens
cacccaccttgcacccaggtgatcatcattctgcatggtcatcatttcatttctttcctttctatgtagttgtattgcatatacatgtattcctataaaatatatttttttactttagttcctttagctctatattaaaaggtatcatgctatatgtaatctattgagaattttatttttcacttactgttttatagtaccaagatttgtccatattgttgcctgtcactgtagtttatttatattgatagtcatattcatactcatatccttcatttgccttccacctttcaaaatttcactgctatcacctgggaggcggagcttgcagtgagccgagatcgcaccactgcactccagcctggcgacagagcgagactctgcctaaaaaaaaaaaaaaa

SEQ ID NO: 12788 - DNA, 401 bp, Homo sapiens
cacccaccttgcacccaggtgatcatcattctgcatggtcatcatttcatttctttcctttctatgtagttgtattgcatatacatgtattcctataaaatatatttttttactttagttcctttagctctatattaaaaggtatcatgctatatgtaatctattgagaattttatttttcacttactgttttatagtaccaagatttgtccatattgttgcctgtcactgtagtttatttatattgatattcatattcatactcatatccttcatttgccttccacctttcaaaatttcactgctatcacctgggaggcggagcttgcagtgagccgagatcgcaccactgcactccagcctggcgacagagcgagactctgcctaaaaaaaaaaaaaaa

SEQ ID NO: 12789 - DNA, 3992 bp, Homo sapiens
tcccagcactttgggagaccaaggcgggcggatcacgaggtcaggagatcgagaccatcctggctaatgcgatgaaaccccgtctctactaaaaatacaaaaaaattagccgggtgtggtggtaggcgcctgtagtcccagctactcaggaggctgaggcaggagaatggtgtgaaccctggaggcggagcttgcagtgagctgagatggcgccactgcactctagcctgggtgacagagcgagactccgtctcaaaaaataaataagaaattaattacttaattaattaaataaataataaaaataaaaatttaactgttaagccctgccttcttctcttatctttatccataggcctggcataagtgttcactaaaggcttggtgggtgaatgaaatagatatatccaatattagaggaactagaggtgacacaagaatgaaaagagttggacctatagaatgaccccagatagtaagaattaggaattcagtttctctaagcatgaattagtgaagtatttcattaggaagggataaagaaatggtttttggctaaaaacaatgattccttccttgacccagtaattttaaaatccagaggaagaaaactaaactagaatgaatatgaattcatgaacaattgctggtacaggaaataagtataagagagtcattgcgtagtggtgacccttggggaaattatggtatatgtttgtcttcagtgcatctccaccagctccatgcgtgcttcccatccccatccctaaactcccagctgacaaccaagacaactattgtgcagctttggtttcttctattacaagaaaatgtcatgccaaatagtactggaataggacttaattaaaatactctggtaagattgagacatttactgagtccctacaatgtgccagccattgtcacattaattatctcatttgttttctgttttttttttctttttctttttctttataatttagaaacagggtcttgctatgttgcccaggctagttttgaactcctgggctcaagcaatcctcctgcctcagcctcccgaagttctgggattacaggcatgagccaccgcacccaaccttatttatttttcttataatgttatccctatttatttatttatttgttttgaggcagagtctcactctgtcacccaggctggagtacagtggtgggatctcagctcactgcaatctttgcctcctgggttcaagtgattctcctgccttagcctcctgagtggctgggattacaggtgcatgcccctatacccagctaatttgtgtatttttagtagagatggggtttcaccatgttagccaggctggtctcaaactcctgacctcaggtgatctgcccaccgcagtctcccaaagtgctgggattacaggcgtaaaccaccacacctggcaatgttatctctatttaatgaataagaaaagcattcaaagaggtggagttaactagcctaagtttatgtagctaatcaggttcagaatccaaatttaaacccagggctgcttaatcccaaattcaatattcaaaggaggcagtgtgttgtactggtcagacagaagaaagtgcacatgaataccatgcttgctctaacactttgtcaggagtatttcatttgggtccaactcctctactattcattcatgtaagcccagatgctggtaagaaatgggaaagctaaggaataggtaacaaaaaaaaattaggaattaaaacagacaaacatgatttatacaaaacctggccctactttaaaattctctcagaggggcaaattggccactcacccaaattatgctaaaagatactttacttggcctttaccttgatttattttaattttctaaagattaagtataatttacatacaattaaattatgtaaactagcttgcatacataccatccagtgagtcttgacaaatgcatataccttcttgacctatcattttccaattgctcattagtagtgtatagaaaccctgcaaccttaataaattaacttattctagtaggatttttgtttgttttccttaggattctctacatacacaatcacgttgtctaaaaatacactttaactgtatccttcccaatctgtgtatgccttttgcttgctttttcttgccatactgcataggctagaatctccaggaaaatgttggagaagcagtgagagtagacattattgccccattcctgatcttagggtgaaaacattcagtttttgactattaagtgtgatgttagctataaatgtttcataggtgccctttgtcagtttgagggagcttccttccatttctagtgtattatttttacgaagaataagtattgaaatttgccaaatatgttgtctccatctattgagataatcatagtttttcttctttattctgttgatgtggtgtaatacactgattaatttactcacgttaaaccaactttgcattcctggaataaaaaccctacttggttgtgatgttatccttcttatatattgatggattcaagttgctaatattttgttaaggatttttgcatcaatgtttacaagggatattgacctgtagttttattttcctgtaatgtttaatgttttccatgtttccttatgcatatttaaaagaaagataagttggccaggctggtctcgaactcctgacctcagatgatctgcccacctcagcctcccaagatgctgggattacaggtgtgagccaccaggcccagccttatgaactgaattctaaaataagtttaaaaagcaaaatgcaaaataatattatattaaatatacatatctttttgtaaaaaaatgataaaaatatacatgattctgatcatttgtttaaaaaagaaacaaagttaaggtaagccacagactaataaaattgcttacatacagagagtgggtgggaatgggataaaaaggagaaaaggtactgggctcggtggtaatggtggcagtggtggtggtggtggtaaacacttccctgagtatgcctttttgtgtggctgtaaacactttttagagtcatgttaacccatttatgcctggggttcaacattttttgtgtgaaaaatcagacctgggcaatgaccttgagcagtaggatacaaataactctcacaagtttagcgttccaataatggaacactgggcataaatttaatgttttacatactcaaaaaatcaagttcacagggtgccaaaaatggaatacaaacagaaacaagttaacctaactgtattttaataaaataaaggagagctagcatggtggcatgcacccacagttccaactactcaggaggctccagtaggaggatcacttgagcacaggcgtatgaggctggcctgggcaacacagcaaatcctgttggtaattaatcaataaaaatggaaggggtggagggacaggcccaggtaacttttttttaaccttttatttttattttattttaaaaaattgtagattcacaggaaattgcaaaacctattagaagtagtgtatatcctttacactgttttcccctagatacaaggggaactataactatagtacaatatcacaaataggaaatttacattggtacaatcccagactttattcagttctacccattctcatgcactcatttgtgtgaagctctttttagttctattacctgtgtagatttttatgaccgtcaccgcagtcaagatgtataactgttctggccgggcgcgggggctcacgcctgtaatcccagcactttgggaggccgagactggcggatcacgaggtcaggagatcaagaccatcctggctaacacggtgaaaccccgtctcttctaaaaatacaaaaaattagccgggtgcggtggcgggcgcctgtagtcccagctactcgggaggctgaggcaggagaatggcgtgaacccgggaggcggagcttgcagtgagcagagat

SEQ ID NO: 12790 - DNA, 84 bp, Homo sapiens; identical to SEQ ID NO: 11505

SEQ ID NO: 12791 - DNA, 766 bp, Homo sapiens
agaccattgagcctggcatatagtactcaataaatacttgttgaataaataaatgaatagcgactgtgatagggtaataataaaatagtaataatcactacctgtgttaagggcttactcttatgctagacactgttccaaatcctttccatgtttatgtttctccttttagtaggattgtgtttatttccattaaacatcaccaagaaaaacaaaaagaaatcctgtattaacatttgctgcatttctaaatgacattctggccaaaaactatagtttatcttgacgtagatgatttttgcaatcaagacaagttatcactcaaagaccactccaatttattgtccaatcctctggtaacaaatgtggtcagtaggagttcttatacctggcagatagacaagggcaatggttttcaaacttttatctcaagaactcattatacccataaaaactattgaagatcctgggctgggcgtggtggctcactcctgtaatcccagcactttgggaggctgaggcaggcggatcacttgaggtcaggagttcgagaccagcctggccaacatggtggaacctcgtctctactaaaaataaaaaattagttgggcatggtggcacatgcctgtaattccagctactcgggaggctgaggcaggagaatcgcttgaacctgggaggcagaggttgcaggagccgagatcgtgccactgcactccagcctgggcaacagagcaagaccctgtctcaaaaaaaaaaaaaaaaa

SEQ ID NO: 12792 - DNA, 520 bp, Homo sapiens
gttgcacattttcgttctgactctcttgtggagttctcttacagccgttgtctttagtcatccctcccccacccggagctgcgacaatggcgttgcccaggaaacgttgcgcttccaggccgctgacatccagggaatgaagtcttgcgtcacaaggggagcgacggccttgtgcacgcgctctgtgcggcctgagtaatctgtcggccctgagtaccaccaggggcttttgaatctttgccaagggagaatggggaagattttgcaacttatcaataacctattagctaatgttgctggggaggatcttcgactttgtgtgattattgtgctaaagtttcaattaatcaccaggccctgtggccctacttccaaaatactatacatcccaaattcatccactgttttgtgtctctacctgccattatcctgttccaggctcccagcatctttcactgggatactgccgtaaccctgtaaatagtctccctgcttgtcacccttgccccactacactcca

SEQ ID NO: 12793 - DNA, 6271 bp, Homo sapiens
aggatgctcacaactgtattcctgagctggacagtgagacagccatgttttctgtctacgatggacatggaggtaactttaacagatcatattggtaacattctaggaccccaattccagacgttccagggcaagaacaggtccctttgttcatttactttccagggtctggccctcattatcatttcctgcgtggtgctgtttttctgtattctgtcattcttttttcccagtaggtactgtattggtttataatctcaccaggacttgttttaatccaaagagcctctatctttttttatttttattttttaaaatttttaggctgggcacgcggtaggtcacacctgtaatcccggcacagtggatcacgaggtcaggagttcgagaccagcctgaccaatatggtgaaaccccatctctactaaaaatacaaaaattagctgggcgtagtggtgggcgcctgtggtcccagctgctcggaaggctgaggcaggagaatcgcttgaacctgggaggtggaggttgcagtgagccaagaccatgccactgcactccagcctgggcaacagagcaagactcttgtcttaaaaaacaaaaaagtgtacccagttgagctgattctttatctttttttcactggagaactaagtatacaggtgagaaaagacgagatatttatacccgagagaattgatggtgaaatccatttttttggatcagaacttccccaaacagtgtccttcaaatagggttcaggggtgctaagatatttatcccctcaacccttggggttcactccagtatggcatataaatattgtatcactttctatgtgtggggagcagtgctccaggtgaccttccttcctttccttctaggggaggaagttgccttgtactgtgccaaatatcttcctgatatcatcaaagatcagaaggcctacaaggaaggcaagctacagaaggtctgtctgcttacaccgcccattcctcacttgtgtaggcttttcccttgttctctagcccttgggcttttcctttctttttgtcctctagctgctgctgcttatttactcttgaagaattctgttcctaaaacgagcttattggccgccttttagacttgccttattattcctaggcctctgagctgtttttatctgtgagtgtctcttagtgtggtggctcacactcttaatttgtattccatccttgtgctcaggattgtatatagggagttcattttgtactagtcttagactattttgcttatattcaggctttagaagatgccttcttggctattgacgccaaattgaccactgaagaagtcattaaagagctggcacagattgcagggcgacccactgaggatgaagatgaaaaagaaaaagtagctgatgaagatgatggtgagtgtggcatcccttgtttgaggggaaatcagcattttaagaaatattctttaatattacttatcaattctaagataggatggctttctagggacctggggagtccttatgttaaagaaacctatgatgttctcctgcattgtatgtggttatgaaaaggagggagagaattatcttcgttgagtggcatctgagctgtaagcattgtatatacattatcttttgtcattgtgatggggtcttcctggttcctgctagtatttatgtgcttttttttcccctcaagactggagcagttattagccccaatagccaatcattaagcctaaatcctaattcacagtagcattgtgggcttcctggatcctcagccagaatagggtttttacaacttaacaataaaaaatgagacgtcagaggggaagtatagtaactagtgttgttttgattaagaaggggatgaaacacaaaaaccaaaagaagtctgtggaggaggaggagctagggcatgttcttctgagacttgagcgagaggaaccttgggagtgggaggttgtggggaagttagaggctgcaagggctgttgaggtagtgagagggacggatcccatgaggagtctggcatgggggctctgatttagcctcttccctgcagtggacaatgaggaggctgcactgctgcatgaagaggctaccatgactattgaagagctgctgacacgctacgggcagaactgtcacaagggccctccccacagcaaatctggaggtgggacaggcgaggaaccagggtcccagggcctcaatggggaggcaggacctgaggactcaactagggaaactccttcacaagaaaatggccccacagccaaggcctacacaggcttttcctccaactcggaacgtgggactgaggcaggccaagttggtgagcctggcattcccactggtgaggctgggccttcctgctcttcagcctctgacaagctgcctcgagttgctaagtccaagttctttgaggacagtgaggatgagtcagatgaggcggaggaagaagaggaagacagtgaggtaagggcctgtgagggcaggcagatgctgaagttgcagagaggtcctgtttggttgccgtctgtagttttcaactctctttccttctcctattttgacatcatcccccaagacccactgtattctaagctttagtcttgaattcattgagctccatcatcacaggtaccatttgcctttttacctcttcctttgttggtactataacaagcagatctagttctggcttttcagagtctgtctcctagagagagaacaaggagatagttgttaccttggctagttgactgttttcttctctggaaaatttattttctggccacagtgcctgaaagatatttttggctggcagcccttgccttgtcctgggctttttgctagtgactgctaagcccagttcaggatgtcagttgtactcatgctagccctttccatccccccaattttcatgaccatatacttgtatctttcagtgttttgaggacctgtgttcagtcaggacctcttgattctgagtatgagctgtggggagggaggggatcatcccagtctcagcagtctgggatcctccccctggcaggaatgcagcgaggaagaggatggctacagcagtgaggaggcagagaatgaggaagatgaggatgacaccgaggaggctgaagaggacgatgaagaagaagaagaagagatgatggtgccagggatggaaggcaaagaggaggtgtgtggggaaggggagcaatgagtcttgaaaagccacaaggcaggtgtgaatcccctaattttgattttgagacagggatccccctgatactttaggatggaagtaatagtcatggggatttattctgcaaggggaatgagatggtaagcctttggggttgaattatctaaaaacaagggagagggagtgtgctgctgtctctagaaagatgaaatgtgtgcttctcctgtttgttaaagctcttttgggggtcccagtgaaagcaagcataggtgaacgatcaggagcacatcagtgaggaacgcatgttcagaagcccccatgatgctccttttcttcctcttaagcctggctctgacagtggtacaacagcggtggtggccctgatacgagggaagcagttgattgtagccaacgcaggagactctcgctgtgtggtatctgaggctggcaaagctttagacatgtcctatgatcacaaaccagaggatgaagtagaactagcacgcatcaagaatgctggtggcaaggtcaccatggatgggcgagtcaacgggggcctcaacctctccagagccattggtaagggccaagaaactgggaaagacttctagggtctttctctctgtcccagactacctagtagcaaactttaatcttcctagtgcttgtgcctttcaaagcactttaatatctactacctctgttcttatatttctgtgaaataactaagatgggtagaggtatcattatacataggtatcattatacccatcttatgtaacatttgaatgatgaaaaagacctgtgagtgccgggcgtggtggctcacgcctgtaatcccagcactttgggaggctgaggctggtggatcgcctgaggtcaggagttcgaggccagcctggccaacatggtgaaaccccatctctactaaaaaaaaaaaaaaatacaaaaattagctgggcatggtagtgcaagcctgtaatcccagctactcaggaggctgaggcaggagaaccgcttgaatccgggaggcggaggttgtagtgagccgagatcgtgccattacactccagcctgggctacaagagtgaaactccgtctcaaaaaaaaaaaaacaaaaaagacttaaaataaaaagaccagtgagtgactttcttaaggttcagcagtctggtggcagggttgaaactagaaaaactaggacttaggactcagttccccattccactagattatggaactttgtaaagaagggaaatgaatggcaaggtttgacctgccacaaacacaagtctgtgggaagtatccaaactgctcatcaaccattcctttactccaggggaccacttctataagagaaacaagaacctgccacctgaggaacagatgatttcagcccttcctgacatcaaggtgctgactctcactgacgaccatgaattcatggtcattgcctgtgatggcatctggtgagcactggcagaatgccctaaattcccctttctgcagcatgtcttctcttataggactcagggcacctctaggattagagcctaggcagacctaggcctcttggtgggtgaagagcacccagactaaggcagagctgagaatttctgtagttatttacactggcctgggccaccacctctgtccatactcctctacgctgccttagtgagactggaagattctgactgttgttcttgaccccaggaatgtgatgagcagccaggaagttgtagatttcattcaatcaaagatcagccagcgtgatgaaaatggggagcttcggttattgtcatccattgtggaagaggtgagtaccagggtggagaagagagggtgtctggtctgcacagccagggttcactcttttaatctgagctaagtcggcaatctgggagcattatcagtaattgctgacagacgctaaaccccgactccaaagttccaccttctgtcatttccctgacttagccttatgccttatggactagcaggtgggccgttgtgtgatacctcttgcccattcctctcctaccaccctgactcagcaagccagccctcttgtgggactgtagattcctggcaaggtgttcaaaccctgtggctgagctacccccatccctttcttagctgctggatcagtgcctggcaccagacacttctggggatggtacagggtgtgacaacatgacctgcatcatcatttgcttcaagccccgaaacacagcagagctccagccagagagtggcaagcgaaaactagaggaggtgctctctactgagggggctgaagaaaatggcaacagcgacaagaagaagaaggccaagcgagactagcagtcatccagacccctgcccacctagactgttttctgagccctccggacctgagactgagttttgtctttttcctttagccttagcagtgggtatgaggtgtgcagggggagctgggtggcttcactccgcccattccaaagagggctctccctccacactgcagccgggagcctctgctgtccttcccagccgcctctgctcctcgggctcatcaccggttctgtgcctgtgctctgttgtgttggagggaaggactggcggttctggtttttactctgtgaactttatttaaggacattcttttttattggcggctccatggccctcggccgcttgcacccgctctctgttgtacactttcaatcaacactttttcagactaaaggccaaaacctaatcgtacgcatcgtgtccttttttttctgctgccgtggcccccgacttggtcccatctgtagcatgtggcgagcccccatgtgagtgtgtgcgtgtgctcgtgtgtgtcctgcgcgtgtataggagagcccagagcgagctgctggtaggccggcctggcgggcgtcgcggctgcccctcgccccctcctgcagccagaaatgatctagttcccccagggacaggttgggaccggtctggctggcctgaagcctggagtcgggcaggacgcctcctgcgctgctccctggccggctccccgctgccgctga

SEQ ID NO: 12794 - DNA, 9266 bp, Homo sapiens
gcggccgcagccggaggcgcgtcggctggagccggtcacgatgccccgaaggaagcaaagccacccgcagcccgtgaaatgcgagggggtcaaaggtcaggggtcaggggccttgaggggagaggagcgggggtggggtcagtggagtgggctcaggtcagggtggagggggactcctgagggatgaagtgggcgatccagactcctagcttcccaccgaggcactaagggaatcagagtgggtcagcgagtacgggaagtgtggtccacgagggctggttcctgagggagaatccacaagccccctcccctcttcagtggatactgaagactccctcgacgaaggacccggggccctggtattggagagtgatttgctactaggccaggatctggagtttgaggaggaagaggaagaggaggaaggcgacggcaacagtgaccagctcatgggcttcgagagagactcggaaggtgggttttcgggtcttggttaaggattagcggccgctggagaccccagcccttcaggaggcaggttaggtgaacagaacaccatttcctgccacaaccgagggctggtttagtttacatttgagctagatgacttcatttgtttaatggtccaatcacttccatcactttgttgaggtgaagttctgaggcctggtcaaaggtgataggaataggagggtgggtgaatcacatggagcaactgattaaaagtaaatgccctgtctctctccctagcccattccttatgtgtatttacttttaagagaggttcagggaagcaaactctctgtaaatcattcaacccagtatttaggtctaatctaactccctttcacctgcagcgtaagctccttttgtattgagaggttttagtttctgtctttatccttccatgtccctcttccctgtgatcttagcatcaccctaccctaatttgctgcactacccatccacttatgcaagatgttttttgaaagtcattgaggggatccatgtaaatatctgttctttaggcaggcaagtggtattacatgcattactttcattgtctccacttccctccaaattttgcctcagagataggttttattttatatcagctccttactaaaaggggccttagcaatagagcttagaaaaaggtcttgggggctctctccctttcgtatttttactttcttgtctcaagaattaatttcattatggattcatttcagtctgtgatccactgtgagcccttgatccttgaccattgagggaaactagatacaggtcaattctaccatcactagattagtccagtgtaagaggtagacaattcatgttgaattttctggaattactgcaggggagaccttgattcctaggagggaactaaagggatcatcaaagctaagggtggagccaagcaagtggggagaccataagtgaaaaggggagagtttggagcctgatcctaccctatgctgatgtctcttcttatgtctatttcaccaggagactctctgggggccaggcctgggcttccctatgggctgagcgacgatgagtctgggggcggccgggcactaagtgcggagagtgaagttgaggagccagccaggggtccaggggaggccaggggtgagaggccaggcccagcctgccagctgtgtggggggccgacaggtgaggggccgtgttgtggggcaggagggccgggtggggggccctgctgcccccacggctactgtactcatgccgcctctgcaccttcgtgtcccactactcgagccacctgaagcggcacatgcagacacacagcggagagaagccgttccgctgtggccgctgcccctacgcctcagcccagctcgtcaacctgacacgacatacccgcacccacactggcgagaagccctaccgctgtccccactgcccctttgcctgcagcagcctgggcaacctgaggcggcatcagcgtacccacgcagggccccccactcctccctgcccgacctgtggcttccgctgctgtactccacgaccagcccggcctcccagtcccacagagcaggagggggcgggccccggcgacctgaaggtaagacacaccagggaccaaagatcttgggacatgggtggctgaccctaggaatgcttggattggattcatagcccaggtctttgtccccacagatgctctgctccttccagatttgagcctccatgtgccaccaggtgtgccagtttcctgccagactgtgggcagctgcggggtgaaggggagggcctctgcgggactggatcagaaccactgccagagctgctattcccttggacctgccggggctgtggacaagagctggaggagggtgagggtagtcggctgggagctgccatgtgtgggcgctgcatgcgaggagaggctggagggggtgccagtggggggcccacacgctgtacaaaggctttgcctgtagcctctgcccctttgccactcactatcccaaccacctggcccggcacatgaagacacacagtggtgagaagcccttccgctgcgcccgctgtccttatgcctctgctcatctggataacctgaaacggcaccagcgcgtccatacaggagagaagccctacaagtgccccctctgcccttatgcctgtggcaatctggccaacctcaagcgtcatggtcgcatccactctggtgacaaaccttttcggtgtagcctttgcaactacagctgcaaccagagcatgaacctcaaacgtcacatgctgcggcacacaggcgagaagcccttccgctgtgccacctgcgcctataccacgggccactgggacaactacaagcgccaccagaaggtgcatggccacggtggggcaggagggcctggtctctctgcctctgagggctgggccccacctcatagcccaccctctgttttgagctctcggggcccaccagccctggggactgctggcagccgggctgtccacacagactcatcctgaactaggtccttcttccccatgttttatacagacggaccagaagccacctttttctcccccgctggccaggggctccacacagactaacgtaggcactataaggaccagcccaaccccatgggcgggggggcccatatggaccaggggaccttgccttgactgaggcacttcacgagctcagtgagaagggccctgtattcacctccactgcccccaggggctgtggacaaaccggctgggggactgcccagcctcccacctgtttatttaacttatttcagtgctttataataaaggaaacactaacaaagccatgtctatgctgaattggcaatggcaggcaatttggccttacccttagcatagtagtccatgctgtgatgggggaagcaggggcagtgagagggaaccagaggtaggcagcagtcaggctgagtttaatgatggggaactgggccagaccaaacacagacctctgcccatccccttggcctttgcgatggctccaagaggccagaagcggccagaggagatatggttcctccccaaggcaggcagccatggtcccttagactttgtgcaaaatactaaatgctaatttggcatcgagggccagctctgaaaagagaaggggcaatcctctgtgcagccagcccaggggacaaggaaaggtaggatacgaggcccctggccaagagaaaaggggtaggtaggaaagaagaaggaaaagacccctccgcccctagcatgggggacacaggcacagggcaagtttctgtaaattcctctggggtagagggcagacatccaagcagtggagattacagatcctcatctccaatgccctcgaaggcgaaattgccgtggacatcactggcactggcatctgtgctgggactgccaattccccgcaagctcacggcactcagcttactctgtaacaaaggcagggtggggtcagagatcttgggcgtgcaagatcccccaacaaacagcaacctcaccaacgctggaactcactgagagtttgaccatagactcccgggtggcatcaggtgactcctggggaagaagaggcagaggtgtcagaaactcactaggagaggtgaggcagggctgagagccagggttctgaccaggaggtaatacttacaagcagtggtggggacttcactgcttgctggctgtctgagcgtctcagagtaccccccacccgccggcgcagcatctggggacagacacaaggtgccggtgagggcaggatcacttcccctccctctcaagacaagcctcacatctaggacaaaaggcaaggggagcacacctgctcactgctcagtccacacttgctgcctaccttcctgatactgccgccagatttcttcaccatcagttcatcaaccatggactgcaagcagatgctcatcatgatagcctgagggcaagaagagtgtccagcttgatgagagtggtcactctgagcccagcaccactaatgcctcccatattgagtactggaaactctacactttaaggtgctccagaggagggctgagggtaggttcacacctgggggctagtgatggtgacccactgtagccggtccttgctcatgaggtattcaaaagccagttccaggcgcacctcaccccggccccggcctgggctgctcgtgcttccactgggcaatggtacctgggagaggaaggggaattcggttgagttcactctgaccaacctgtctggctccctgacccgctgcagcccatacctaagctcaaggcttgccgggcccccaacccaggcccttccccctcctaacccgactcacagaggaggtgacccgccagcatcgcatgcgggtgacccggaaggagccttctcggagttgctggccaggcaggcggagctgcaggctgagctcactgttgcccgcgctcaccaccacaggacagtccttttctgggaagtcagccacacaggcatcaaagcgcaagtagccatagtgccgcagcgtctgggccagtctcaggaactgaaaaatggtcatcacatgggggtagattaggagggagaatggggcagctcagaaaaagcaaccccggtcgggcgcggtggctcatgcctataatcccagcactttaggaggcagaggcagacagatcacaaggtcaggagctcaagaccatcctggctaacatggtgaaaccctgtctctcccaaaaatacaaaaaattagccgggcgtcgtggcgggtgcctgtagtcccagctactcgggaggctgaggcgggagaatggcatgaatctgagaggcagagcttgcagtgagccaagatcgcgccactgcaagcccttagaggaagacagagaggaggcagggctcacctccttcttggagactttctcttgcagagatttgagttgccggtgctgttccttggtgaccaagatccacccacgctcaatatctgataccgtctatagtagagacaaggggcaggcagtaggaggtcccagtcagcaatccaaggaaagcgtctaccattacctctgtccagcctgacccctagccccacacttgagcgacctctctgcagtaagtccttgatcttgtcagcttaataaaagtagggagagtagatattgtgccagcagcactgatagtattctaggaacttccccacaaattgggaacaaagacacgacagcagttttcttgggagagtgagtcacccgttattttcttcaggggaagggttctgaggcagctccaagctcacctgagcataaagcaggttcaggccaacccggttctccatgacatcgtcatcataggcagagtcccaataactgtgaggccaaggggtggaaaggggtaatggggctaagctgggttaaggcaagaggtagaatggaaaatgggcaaaacaggagcaatctggaactatcaggggctaatggtatagtgggaggaagcttgggaggcctggcagaaacacccagcactacacccccttgtccagattattctgtctcaatatgtggcccaataatccaatccagcacagcacctcccacccctccccttccaggcccagccctgacctcttccttagcacaatcttatactcttgactccgaaggctggtgacagacacataaggcagctcaaactcttgcaacttccgtacaactacaggttaaaaaaaaaaaaatgaaaatatagtgagatttaaaggaagggaaatcaagaaagaagtgccctgaggcaatgttcattctgggggtgggggtggggagttaggggggctgcaaactctactgaagtacccttgtactgcagtcaagtccagagaaactcacaagaaaaggctccatcctctttttctcgaactaagaatagactaaagtatccaatcaagtcatctggaagatccagctttgcagctacagcctggggatagggatagaagtacagctcatcatactggctggttccaatcattctccaagcccaggaccccaggatgtaggggaagaaggggcagtgctgaacaagcgcctcacctccaggacatcctcagtctgatctgaagttagcacgttgaccagaactttctgcccgttgctgagcagcacttccaaggacacttcctctgtggggacctgctgtgtctcctgttgtgagcacacatggggatgggaagcactgccttgtcccttgccttgacctatgcccaactctatttctaggtcccttgtgtgtctttattctcagctgcttaaatataggctgtgatttctttgatttcataagaatagaagttccattccattaaaaaagatgactcctctgttattaagatgacatggcctggctgggtgtggtggctcacacccgtaatcccagcactttgggaggccaaggcgggtggatcacctgaggtcaggagttcgagaccagccaggccaacacggcaaaaccccgtctccactaaaaatacaaaaatgagccggacatggtggcaggcgcctgtaattctagctacttgggaggctgaggcaggagaatcgcttgaatccgggaggcggagattgcagtgagctgagatcgcaccactgcactccagcctgtgcaaaagagcaagactctgtctcaaaaaaataaaagacatgaccttccagcaaggtcctttccttaaatcttggtcccacccaaagccctacctgttgtgcccgacgcaggaaactgttgaaagtctcgctgctcccaagcaatgggtcttgccgaactacgaggacaagagaacattattacaggaacttagcactcactcttggctccccagtcctcctctcagtaggttcccccgaccccatttcctgggctgatggtggcctgccacatcccccagctggcctcacctcactcactgtttgcataaattcttcacctgccccacccttggctgccatctaggtgagtccagtctatagaactagggaaataacaatgatgttaatctaaagcacatcagatacaaattaagttctctccactgatattaagactagtgttatactagtatttctcatagatgttagtgcccaaattgttttgctagtacacagagttacacatcctcgtacactatttactttgctaactgcataacagatcaaacaagagccttcctagatctagaaattaaatcaggcccttccacagaaccagctgtttttaagtctctccccatagtcctcaatatagtcaacctagtttcctgcaaccactcaccagcttgcatgtacttctctaactgctctctcctctgttctacctcagcaggagtcagagagaaaagcttctttggggggaatgcaggaagcacattggccccatactccttccgaagctatttagagaaagagatacaacccttcacataaacacagaaaatgagatgaggcaatctacatatgctcataatgttctcttgggtgcccctcccttccctcagtccctgttcccctgtctaccctggtcatctgagaaacaattcctttgacagcggtagcacctcaagggagctgtcctagatataagttgtgctctattttactgtgtacaagtcagcccctccacagtacggggaggatttgtactgggccaggacctatagggagccccttgaccacctagcaagactgttcactgaacccttaaaggaaggaaagggctttataaagtgcacagttaatagctaagtctgttcacaaaatatcttaggacttaaagggactttgcagatcaaagaatccatctttcagttgtagaaactgaggcccaaagaaatcagtttctacaggcctcatgcctgtaatctcagcattttgggaggcaaggtgggtggatcacctgaggtcaggagtttgagaccagcctggccaacatagtgaaacccctctctactaaaaatacaaaaattagctgggtgtggcggcagccgcctgtaatcccagctactcaggaggctgaggaaggagaatcgcttgaacccaggaggcagaggttgcagtgagccgagatgtgccactgcactccagcctgggcaacaagagagaaactccgtcccaaaaaaagatatcaggtaacttgttcagggttgcacaactaattatcagtggagctctactgagttaaatagagtttaagatctggtaaggaaggaggagaaacattgcatcacagatacataacgataattggcacagctaaacacactgaaatgagccgaagaacacaaaaggaaatcggtgaatcgtttgtataagcagggaaaagaatttcaagttgccgctcagatgacagaaggaatgtgctttgacagcctgggtggaggtagtggggggaggggttggtttgtccatgcaggggtaaaggctactagagcagtaagactggacagaaaaccagaatataagaacaggaaggagcagttgttgcgcggacattaagcttcttagggagttcccggaaatgtcagacaagataaaccagggccctaccctgtggcagtgattaaaggggaactacagcctacgggaacaagaagagcgggtaaagggagacactgatgtccacgtgtagggaagggcttgaagctgtctcaaggcaggggtgctagtcccacctgctcgtgcagccccaggagctggctgtagcgcacccgacagtgcaggactcca

SEQ ID NO: 12795 - DNA, 27289 bp, Homo sapiens
aacgctgtccaactgggcgtacgagtttgacaagtgggccccctccgtggtgaaggtgtcttacaaggtaggtcacagccactgaggtttcctctcttgctacggaggtgcaggcggtggtgggcaggacgtccacacatacctctggacagtgaacctgagaatgctgggtctccagtcgcatggagtctccaggacagcctggaactccagtcacatggatccgggagtttggactgggcagggacagggcagattagctcactggggaggagacaggagtgagcatggtggccagcactcagaggccagctcaggcgcctgagatggggacccaggaagaggggagcctgtcagccaccaggaatgtgcagatggcggtgcaggctgcgtggttccctcaggccccggccgccgctggcctgcactgcttcctcttccccctgcagcgcgtgttctgcgtggtgaggtctggggacgcgccagcggccctgccagcccctttccccactacccctgtgaggacgagccctcccgccgtgtcactgggcagttgcagggggtgcctgtgcccctcttgccacctggccacccggctccaaaagccgagctgtgcatcctgcttcccttgcagggatccccagcagcaagacgggcctttgtcccccagctccggagtgggaagttcaacgtcttgctgacgacgtacgagtacatcatcaaagacaagcacatcctcgccaaggtaacgtgtccctgtgggaaatgccaggccatgggccgagtgctcacacgtgggtcacgctgcccgtctcctccaaagcccctacaagtttcttcccggagtcccacctgcatgtgcgtgaagacagctgccctgtgtaggggaaaggcctaggtgggggcgacctcaggtttacctccctaactgtctccaggcaggccctgagtcaggcccagaagctggggccatctacacagcatgcgctctgcctcctctcgggccttctgcccagagagcctcagcaccaaggcgtctcctgacccgcctacagagtccccatggggccttggccagaccagtcttgtcctcctgtctcattgccttggccgtccctccctggggccctggcttctcaccacaggccatgggctgagattcagcatgtgggggagagctcgagggccaaataccatgactgcctgctggccttgggcagctggttcgggctgttctgtgagggtcctactgtcctggaagcctcttctgggacgaaactgtgaagggagtcccagcgtggccatgactgagaatacggcccagatagaaaacagacatagccctctgcctccaaaaactcatgttcctcatttgaggaggggtaaagatgtacctggtctcacccctaaacatccagctgagtgagtgttgaacagtagagagttttttgcgttttggtttttttttttttgagaccgagtctcgctctgttgcccatgctggagtgcagtgatgtgatcacagctcactgcaggcctgacctcctggcctcaagcgatcctcccacctcaccctcctgagtagctgggactacaggtgtgcgccaccactcccagctaacttttttaaatttattttttatggagatggggtcttgctgtactgcccaggctggtctcaaactcctggcctcaaggaatcctctcgccttggcctcacaaagcactgggcaactgtgtctggcctaacagtagagttcttgacccaggtatggggggatggaggagctgtttatgggtggctccgcctctcagtgcatggctggagtgacagtactggaatactggggctgtgaactgggtgttttcttttctttttctcttcttttttttttttattgagacagagtctcacagctgtcacccaggctggagtgcagtggagcgatctcagctcactgcaacaacctctgcctcctgggttcaagtgattctcctgcctcagccttccgaggactgggtgctttatcccggagccaacaagggaggaaactgaggcccagggagctgggtatcccacgtgcaggctcttacctcaggtccatgcttcaggtgcctcctttgtggctcacccctgctgactccttacaaagccaggccgttggcaggcacaggaaccaggctctgaaaccccgtgctcccctgccagtggctcagttgatgtaatcaccctgcagtgggagtgctctttgagtgcggccactgcgccccctcccgacccgcatggccctgtatgtagtggcgctggcccctaccccatggggcccacattctgaaccacaggctgctcattagaaatgtaccgtcaccaacccagttcccctgagaccctccacaccagcaggacaagtcccccagtcagcaagatgtgtcttctgccagaacgtgctcggcatttttctgtgctgtagattcatatgtgtgattttgcagggaagccagattgcttttttgcaatttgcattgttcacctgccaatagtcatggggtcacgggcctgtctctgcccaaggcttgcaagaggctacgttgtgtggctccaactcggtgagtcagccccggggcaggacgtcaggcctgtgctctccacccagctgcgctcttccacctggagccttcctggctgctgggcgcagagtgggagattctccccatgtgccgggccacctgctgccccctgccctgattgcccactctggggcccgcagatccgttggaagtacatgattgtggacgaaggtcaccgcatgaagaaccaccactgcaagctgacgcaggtgctcaacacgcactatgtggcaccccgccgcctgctgctgacgggcacaccgctgcagaacaagcttcccgagctctgggcgctgctcaacttcctgctgcccaccatcttcaagagctgcagcaccttcgagcagtggtttaacgcaccctttgccatgaccggggaaaaggtgggtttgcccagctgtgcccatgctgacggttccaggtgcggctggctttgctggttggaacgtgttgagcaccagctacagctggctgggcctgtgctgggtgcctggtgagagtctgcatctgcatggagcaggggagccctggaacccaaggctggggcagccacaagggccccaggggagcagggcagaggtcatggtggtgaatctcggaatgctcggggcgtctctgaccctatgctccaggtgcagagtggatggtgaggaagatggccctgaggcagctgtgggaccgcaagcgtgtggagagcacagctagaggctgtagcgtgctgtaggcccctttaggtgccctcagaactcaccctcagggcagtgggaaggaaacttggaagattccagttagcggggccacatggtcaggttctgtcttacgttgttttcaaaaagctcagtggccagtgtgtctcaatgtctgggtggcaccatcagccagactgtggcatggcagcatcatcattgatgagtggtcccacaccagcactgatccctgagcctagagctccttgctgttggaggttgaaactgtgggacagactgtgtttcctgctgaggggtttaagtaaccagatgctgaagtgtgggcagaactacagaggttacctcgaagtgccctgcccagcacggctgggcccacccccttcttcccaccttagacaggtccagggcagctggggccttcctggcctcatgcgtgagttccctgccctctcggctgctggtcaaggcagagactcttctgatggcgaaaccgaggcattccccaaagcctcgtgataaaggagtccccaatttttagactcccgggacccccacactaagggccaggatctgatgctatagttttgtcactttctgagccgagcaaaagctctgccaaaggattgccagggaagcaatagaagaaaagttttggcgtcgtctcattttcctttaacttttttaattaaaacattttaaaagttaattattagtagaggagtaggcgccgtgggaggtcagggtttctttcacctggttccacccaggctgaatgagagtcccttggggctcccggtggcagagccctccctgagaatcacccgctataagccccatgtggtcagcctggcccctgcagcgctcctggcatgagcttggcgtggggtgggtctgtggacactccagtttgtgttactcgtggagaagcagcatgcccgctgccgggggtctttctggtgaggcacagggagcagagtgctctgggtactgcggttccatgtcccaggaattacatggagggaaccagatcctcacagtttcctaaggaagagggtgccctgcctggctcccagaaagcataaagcaggctgaaaagccacgtgccaagggcaagatcaccccaggggaccccgtccaccctgtccccacatccgcaccttctagtgagacctctgtcgccctcctttggaggtaacgcttgcttctcctgtcttgggggcttccaggtggacctgaatgaggaggaaaccattctcatcatccggcgtctccacaaagtgctgcggcccttcttgctccgacgactcaagaaggaagtcgaggcccagttgcccgaaaaggtgatggagttttgaggggagccaccagtgaagcagcctcacgtgggggctttctccagggctgggcgtgctcagggcctctccccacagtcccaggcctgccctggtcaatccagcttgggggtggcgatgacgccactgggtctgtaaagccctgtgctgctgttgtagggattgaaaagcactcataggctcacatagctcacaataggttagagcacaaaatcccacttcctgtcagggggccaggtgcctgtgcgggctctcctggccacatcaggaggggccgtgggcttggggttgccccccggccccccatcatggctctgggttttcaaggcctgctgcagccacacccctgggcccagttcccacagcaagacccatggactcggggtccccggctgcagttgtccctcttggctctttgtttcctggctggctgtagagaggcccccagaagatggctggggggccctttctggcccagtaaccctctggtatctctgcctggtgcttcctctcattgcccaggtctcccctcttctccccagctgtgagggtctcctcacccacaccccagtgtgctctggtcagagctcatatgacagggccgagggggtcagagctgggttcggatggggggagtcaggcctcaagccaccttgggccctcgtgagcattatgtgtcccctgcaggtggagtacgtcatcaagtgcgacatgtctgcgctgcagcgagtgctctaccgccacatgcaggccaagggcgtgctgctgactgatggctccgagaaggacaagaaggtgggccccagagtcccccaactgcattccccactgggtgtccaaggccggcagcgtggcaggcagagcagagcgtgctctgaccatcgggtcatgatctggtcatgatccccagggcatctggccagccctggttatgatggctggtggcttgtgtcaggacacactgactcagctgccagtggcttctcctttgcctatgaaacactggctccttctgcaattggcagcctgggcccagcactaaccccagcagggttagagtgttctagaatgccccccttctctgttattaagtgaaaggaagggagcgggctgtctcctgcaggggctgctctgagaatcccaggccccaggccccacctgcctggctctcctcaccagcagtgaaattatcctcccaggaaatgcaccagaccccttgattctgcccccaaggccttgacctcggcctggcttccccgagacgttgtgtctgtgccccttctcccctgagctgagcagcagtgtgttccctagtccattcccagcccagagcatgcaccccccgccccgcccccacctccttcctcatcctggagcccagggagccctgagtcatggctcacccggctgaggccctcttgcccagctgagaccctctagggacccccacagtaacagtgcccagaacaaagctggcatcacaaagcatcggggactctgcctcagccctttgccagtcttgtttccgtcccgtcctgctggccctgtccctgccatctgccctctgctgtgccaggcagtcatttgtttcccagggcttgttgggggcctccgggcctccagcctgccatctcctcactcccaattgctgtgccaaaagccactcttccccactagagcgtccccatggcccttctcccaacacccacccatccaccaagcccaccccaccccaggagggcaagaccccatttgggtccctctcatctgccttccagggcaaaggcggcaccaagaccctgatgaacaccatcatgcagctgcggaagatctgcaaccacccctacatgttccagcacatcgaggtgagcccgccgcggctgggacggctcaggccctgctgtctgctgagctcctaggcagagctggcttctcctcgacagctctttaaaaacagactcgaatattttcattaggtaatgcctgtacatctgtctctcatttggtcttcgcttcaccagtgcttacgggaagaatcccagcagttagggcgcaacgtgcgataggaatatagggccctgaaagcttgccctcagagagcaggagcgtttggagacttctctggggatgtgtccccccacagtggggtcctgctgcgtctctttggctcactggcttttctcacgttgcggggcgtcaagagtcaccaccgtcttcagtgaagtgtgggggagtcagaaccctttttggtcatggtggctttgagaatctgggttcttagaagcatgcatatgttcgtgtttcttggtgtaaagtgtcagggtcgttggagaccgcctgctgccccgagagcccctggggctgtctcagcaccctgagcgtggctgtggccccatgacgtcctcgtgcattcagggtgtgaagagtgctgtatgggatgtcctttccttcgttggaggagtgtgagggaaaggatgtcagtggactaagaaagatggttttggcatctgtgtctggtctcagagccgccgtgggcccgtgccgagcacacagtgtgggggctttgtcctctgagcacgagcggtgtgtgcggaccgcagcggggcccggtggcctgctcctgcctgtcactgacccctctctccttgccttgcaggagtccttttccgagcacttggggttcactggcggcattgtccaagggtgagaagcttcccaactggatggggtgggcaggtggtccacccagaggttttctgtcgttttgttggctttattgctgctgttatgttgtccaatttcaaaggcagaaaattagaaaatacagaagaatccaaagcaaataatacaaatctttttttttttttttttttgaggtggagttttgctcttgttgcccaggctggagtgcagtgacacaatctcggctcactgcaacctctgcctcctgggttcaaatgattctcctgcctcagcctcccgagtagctgggattaccggcacctgccaccacccagctaattttttgtatttttagtagagatggggtttcaccatgttgaccaggctgatcttgaactcctgacctcaagtgatccacccgccttggcctcccaaagtgctggaattacaggtgtgagccaccgcgcccggccccattatacaaatctttagtgcttggagagctgaccactattaaccccaagagacaggattcctgaggcagacctggcttacagatcccactctgccgcctccaagctctgtgactctagacagctttcttaacctctctgagcctaaactctgctcactagtacagaggcactctttacatcatgtgggtgttttctatagcaccctttgtaaggggcagcccagactcctttaagcccctaatggatgtggatgctgtgtctagattttcaccattgcaaagaaccttgctaaaagcattcttccagctaaagcctccattcaattcccctggggtagtaagccatttgcaagaagagaggcgcctaatgaaaacatcacaaattctttttgatgtgtttttttatactgagttgtggaacagggtcctgtacacctggcttcaaggctgggaggcctggcttggacatgtggtcagccatatcacgtcgtccccctgccagcctcagtgtccacatctacaacacttggggtttggctggagagaacatgagaagccgaggtggcccttccttctgggtctagcagagcatgggtgtctccagtgtggcatttgctcctggggcttctttatcgggcaaggggacaaggtctggcttcccggagcatccctgttccagccccgtgttgtgccggccatgtgactcacagctcctctcattttcatgagtgtctgggtttgacgagaaatacatgtgccaccctggtgatacgcctccccagcgagggtggccgggcttatttcagttgggggaaatggctttgctgaagctttgggtgggtgacgtctgcttaggatgcatgtctgtgcccttgaacccggcgcctggcctggaggcgggcgatgcacctcctgccttacctgcctgcagggttccaggtttaacatcctgcgccttctctcctgcctcctccacactccaggctggacctgtaccgagcctcgggtaaatttgagcttcttgatagaattcttcccaaactccgagcaaccaaccacaaagtgctgctgttctgccaaatgacctccctcatgaccatcatggaagattactttgcgtatcgcggctttaaatacctcaggcttgatggtgagtatgagccagtgaggcgtttcttacagggttttgttgttgtggctgccacagaagctcctcactggcattccctcctgtgaggcagggtgaggcccaggcgctctgggtccagtggccagagtgggcctagccacaggctgagcatcttgggcactcggcactgggacaggccgtggattggacgccgggtgtcctgactcctaggctgacagtctttccacgacaatgctgggcgcactggggaaggggtgccctgtgcacttttagctggaagtgacagaattccataccatgtggacacaggaaagaaagcaccaataggcttacatagctctaaccccaggaggttaaacatccttcaggcacagctggatccaggcatgcaggtgatattggagagacttttctccagctctttgctctgccttcttccatcttggcttcctttccacctgctcagtgtccccaacaaaggcaggtcccaggctggctctcatttagctgctgtgagccgcatgcccatccctgggccattcgtagcagcccagtgactgccaccttgccacaggtcaggcctggacctggaatcagactctgtggtgagcacggagggagggaagcaagcactgccaggcaggagcagcagctgccgtagagaggctctcagcccaaccccctgccctgcggtccctgatgggaaaggtcaccgcctgtgtttctgcgcctgcctgccccagcacacgggagctcagggaggagaggctgtgagatgccgacagggcacgtgagacatgtctgtcagtcccagtgggtcagggagccctggagtgagttcttcgtgggagttactagaactgggcttacgagaaacacgagcatgagctgctgagacagacacggctcagccagtttgttgttccctacacgacctcccagagcctttgttgaagctcctgtgcaaggtctgtctcacagcaggacaccccagacctccataccccttgtcccgttgatcacttggacctgtgtttgctgggccaacctgcccaggtgccacccggagtgtgccctgtgtgtccctccaaactgcaggtcctccccggggttctgtccaggaccactctacagacacgagtctgttgcaggggtctccccggcttgccttcttccttgggggcttcccactttcagctttgaggctgaaaaccaaaatccttcagggtcctcatggccgggccaccccccaccctttcctctcctacggtctctccagcggcttctcccgtcctcgagagggccaaggcttcctgagggccatcccgtctgtgtcgtgtccctgactcccccaggagagagcctggttcccacccatcccagtgcccttctgcctactccataaggacaaggactttggtcagttgaactacagatgtgtcctctgcatgtgatgtggtcatggccacagggccagagaatccattgcgagtagaggaagggtaggagctcagtgaagtctcctgagactgcatctcccatgggtgggctggcatctgggagccgggtggcccctcacctcagcccctcctccgagctggagtagcaggggcacatctggtgcctgagagagggtgggacggcaggtggatggccaggctactgtgggcttctgcaccgtgcctgggcatgtgtaggctggtggcaggaaatggccagtttttatttcttcttttttttgagacggagtttcactcttgttgcccaggctggagtgcagtggcatgatctcagctcactgcaacctccgccgcctggattcaagcgattctcctgcctcatcctccctggtatctgggattacaggcgcccgccactacgcccagctaattttcttgtatttttagtagagacggggtttcaccatgttggccaggctggtctcgaactcctgtcctcaggcgatccacccacctcagcctcccaaagtgttgggattacaggcatgagtcaccgcgcccggcctgccagtttttatttcatcaccaaaatgacttcagtgttcaggggcacctctgtccgaactcccagcagcgcagggagtgttgacattgccttaatgcccacaacgctgagggcatcgtgggttgtcacccaggagacctgctctggctccttgacttgggttttctggggcatggggacactgatcctgccagaaaggacacgagccccctttataaggtctccatgcttttaccgtagaagattctctttgtgaaccacaaaactttttgagacagggctgaaggcaggtgcacccacagtcactgtccacccacccccaggtcccttgtgttgcgagcggcggtgttgccggcattggccgctgtgtcttccgctccccatggaatggcacagggtagagtagaggagagaatccagggctgtggtggtggtggctgtgctgacgctggacgctgtggcctagctgtgggctgggtgctggactctgtgctccaggcccacctcctctagttctcccagcggggcctgttttcatttctgggatgtgtggagagacgttttgtggtgaaacactggaaatccagttattcgccagtggcccacaggcccgtgtggagagtgcggagccagggatctggggatgctggcaggtgctgatcctgctcctgctctcagaagcaggtgttccttggtgtccccactctacccctgaggtcaccccgctgaccctgttctcctctgtgcccgtcaggaaccacgaaggcggaggaccggggcatgctgctgaaaaccttcaacgagcccggctctgagtacttcatcttcctgctcagcacccgggctggggggctcggcctgaacctccagtcggcagacactgtgatcatttttgacagcgactggaatcctcaccaggtaaaagcgggccgggccccaggtcgaggagaaggaagggggtgcctgcaaaacctcgaggagacggccctggcttgagggtcctccagcctcctccacattgtcttggaccccaggagccgggaggagctgcacccatatctccataggtcatcagggagaaaagaggcggggtcctcctgtttcccaaaatacaaacagcctttccctctgattgggaaagcagtgtataagccatccgtcggtttggtttttcttaaatcttggaatggcacccatgaggaggtggaaagtatcctgatcaatctgcgccgtcactgtggggcggcccctgcagtgtgccctgtgagcacacacactggcgcttgttcagacacaattgggggtaaactccatgccacttcgtttacttcctcctcttgttccataaccatgtacccctcatgggcctcggcatcggtggataccaggtcatgctgttacatagctacaagaatttgaaaatgagttaaacttttctctgtgtttcattataagactgataagttcttattgtttttaacatgtaaacaccagtgacagtcaggagtcccttttcccttcctctccaaccgtgctctcttctgagcctctgccagcccatctgccttcgcacatgtatgtactgagattaacacagatgcggcgtggcctagcatgtgcctcttccaccaagcagtgggtgtcaaccgccgagtgcacatcggaagctacccagccatctaatcggccaccaggcgtcccggcagatggccacccctggacgtctgctctcaaactctggttggcaggcatccgtcttttctgttgatcagcctggtcaccaacccagcagggtccctctttctctcagagtgcttgtgcaaacaccctaggtctgcgcagccctcagacatggggtcgctccaccccagacattgtcctcttcgtgttctggttgctactgccaaagtggtttcactcctacgctggggtgtgaatgtaccctgcccttccctgcagcgtgagggcagcagcgttctcagtgtgtaaattgtcgcttgtctgatgggtgaatgccgtggtggtcactggtggccccttttacgatcaggctggggtgtagcttctgcccagaccctggtgaccagccagtttcttaggaggtggttgagttgtgtgtccccgttggcaggccggcagcaggcggaagctgcacctcagggctgggggcgcgttggggagggctggccctgccaggaagtgtgctgacagggcaggagggctgagcggcagacacaaggcactcctggtccccaccagctgtggcctctgccaccccatgggtgccagtcttaagtttcagagcatcactggtactcaccctggtcctgcagctcctgggcccagagacaggatttcgtgttagcctcctcgtactgtgctggggtgatgataaaactaacaacccaggctggacgcagtggctcacacccgaaatcccaacattttgggaggccgaggtgggtggatcaactgaggtcaggagttcgagaccagcctggccaacatggcgaaaccctgtctctactaaaaatacaaaaattagccaggcatggtggtgcatgcctgtagccccagctactcaggaagctgaggcagaaaaatcgcttgaacttcgggaggcagaggttgcagtgagctgagatcgcaccactgcactccagcctgggcgacagagcgagactttgtctcaaaaaaaaaaaaaaagaaaaaaagcccatccacggcacctgcattgttgggagctaactgcaccagtcactgggccacactcctggtgcttattcactcattcgaggtatgcagtagccacgggttgggccccatgtaggctgagggagttttgaggctcacagaggtgagacctggttccggttctgtgtgcactgtgagagtggcagggcccacagccaaaccaagcactgccacaacacggccgagcttcggccccctgttgtaaatggtgctcgactgtgtaggtccacgctgtggggagctgtgccgctgccacgggagctgcttgagaatataatcccctggggggttggtgctttcttcccgaatatctgtggggtcccaataaggtagaaggtggcacttctggaggaacgtgatgagagtccccttcccccgagggacacatggcggcccaggctccaccagctctgttttcatgcggcggcaggtcaggctgggcagaattgtcaggccgagggtggcacgcacagcacacctctccagctagtgtcagaggccaccttcccttttatgacctcctgggctcctttgggactgactggcacctcttcccccaggacctgcaagcgcaggaccgagcccaccgcatcgggcagcagaacgaggtgcgtgtgctccgcctctgcaccgtcaacagcgtggaggagaagatcctagctgcagccaagtacaagctcaacgtggaccagaaggtgatccaggccggcatgttcgaccagaagtcctccagccatgagcggcgcgccttcctgcaggccatcctggagcacgaggagcaggatgaggtgagcccagcaccggccccgacccctccccagcgtgaatggtggacgcgtgagcggctttcatttttgtttttttaccttttttgcactcttattttttttgcatccctttggagtaaagggagtgtgggctgaacggaaagaggatgagtacttgctttttctttgaagtggtttttttttctaaactgctggtgaaagacgccggattgacagccctggagactgaagtcctctatttatccacagagcagacactgcagcacgggcagcggcagtgccagcttcgcccacactgcccctccgccagcgggcgtcaaccccgacttggaggagccacctctaaaggtgagaggggtagttcagtctccatgcccattcaatcctcggcttctcggctgagacggccagcaagggccctggtcccacggagcgtgcgtgtgcgtgtgcgtgtgtgtgcctttcgctgccgtgtgggtccccatccaccgcagccgtgccgggaccaccagctcattcccacggacgccgccgctcgcctctgagctcggccgccgcccaccccggcccctcctcagcggcactgacagtttgcaatcttataggaggaagacgaggtgcccgacgacgagaccgtcaaccagatgatcgcccggcacgaggaggagtttgatctgttcatggtaagcgctgcaggctggatggggcagttcaggcatcccactctgctgccaccaggagcaaagcagacgtcctagtgcccatggtggtatccctagcaggtcagggagccagggacagctcacagtgcagcccactcccacctccagactgacccgtcttccacccccagtctcctgaggatggcatcggagggcgagatgcacacccagccttctgcatgtgacccgagacctgccccaccagctctgttttctaacgggctctccagggcttcatgcactccctttcagagggagttcgccctatccaaggccaagggactgaccaggccttcagtcgcagagcccccttgcccctgggtgggaaacaggaaataagccacccaagcaggggccccttggcccgcaggcctcatgcctccaccaacgctgggccacgcagctgctgcccccctgctggggtctgcagccctcttgtgcaaccttccatcttttcgagtttcctctgcctcctgaggcagagcctctagtcagggtctgacggagccaggccaggtcagccactgaaaaatcgagagctactgtttaactctcgcagcagcgtggagccccacgggcagagaaaggcccttctgaactctcggtgttctggctctagcgtgcccctggtgcctgcatgctgatgcctctcccgttgcctccctgcccaccagcgcatggacctggaccgcaggcgcgaggaggcccgcaaccccaagcggaagccgcgcctcatggaggaggacgagctcccctcgtggatcatcaaggacgacgcggaggtggagcggctgacctgtgaggaggaggaggagaagatgttcggccgtggctcccgccaccgcaaggaggtggactacagcgactcactgacggagaagcagtggctcaaggtacatgctggagaggcccagcagctgccgcaggccagcgccaggcagggctggggagacaaagggcccaccgccaggactcaggcctgggtccaaaatgctttccttgggccactcctggccaggctccgcaggcagccgagagccttccgatgtgggccagggatggtcaggtccttttggctctgccttggaatgcaagaaggacccacggttcctgagcagctcaaaacctgctgctggttatggttggtctttcaagtaaaagggtttacctcttcccgaggttaaaaatcatgttgctgatctcagtggactgctggctttcccagtacctgccaggagggaggcacaagggtgaatcatggactattgaggcgccctgcaaagcgttgcactgctggctgcaggcagcctcactttgggcaagtccccccccatgagctggggagactcagtcatggggagggaggagagggcaagcccccaagggcctctgaacctggcaggtgctgcacggggctggcagttgcttgtggagctgacgtgagggcccgttctcagcagatggcagctggccctgcaacagcagctgcagatgtctttgagtcagtcgtgcggtgctcctggggcttcacccgacccaactttcccagcccaaggcacactgtgacagatgcctggcactgatgtcctcactggggttacggtgacagatcagaccccttcccagctcaggggctctgagttatagagacgatgattcagaatccatccctgaagttgtgtcataaaaatgtcctgaagcaataattccgagaaggcaggtggcagcttttggctatgccatgcaaagtgccacacccaggaaagagccatgtggcctagcccatgtggccaaacagccccggttccctcctgggacctcagcagcccagactcatgagcttgcctgccaagctgtgcaccagagggcgctgttgaaacacaccaggagcccaggtgacagacaggccatcctgttccccagccagcctcccaagcacagcgctccaggacccagaagagaaaccctgaaaagacagtgtgagccctgccacagacctgtgtgacagcagagctgtttggctgctgtatgagtgtcaccggccctgcatttttttcttttttaataaagacaaagtcttgctgtgttacccaggctggcctccagttcctgggggctcaagtgatcctcacacctcagcctcctgagtagttcagactacaggtacacaccaacacgcctggctaattttaaattttttgtaaagtgggggtctcactgtgtcactcaggctggtctcaaactcctgggctcaaacaatccacccgcctcggcctgcagagtagctgggattacgagcatgagccacggtgcccagctcagccctgcatatttgaggcagtgagtaccttttaaatttaagatcagttcatacgtggctgctctatgtacatttttttctaggtgtaatttacataccatacagttcacccttttggggtatatgatacaatcatcttcagtgtatccaagagttgtgcatctctcaccacagtccattttagaacattctcatcgcccccaaaagaagccctgccccgatttgccattcctggtaattcatggattctccccagccccaggcaaccactgatgtactttctgtccatatagttttacctgttctgggcgtttcctgtcagtggagtcctacagcgtgggatgctttggtgtcaggcttttttcacgcaatgtaacatgctgacccatgatgcagcaggtgtgttgcattctttgatggtgaaataatcctgcctcgtacagatttgtcacattcggtttttctgtccattcttgatggacacttgggttgtatccactttcgggctattacaaacaatactaccgtgaacattcacgtacacgtttttgcgtgcacgcgtttctctttaatatgtgatttctctttaatatctgatttctctttaatatgtgcctaggcgtagagttgccggaacaatgttagttctctatttaaccttttgagggaccccagcctggtttccttggtggctacgccagttcacagttccaccagctgtgtatgagaattcctctttctctacatcctcagcaacccttgctgttccctcgcccgctgattctagccatcccagcacgtatgaagtgccatctgagtgtggttggatttgcatttccctgatggctaatggtgtggagtatctgttcatatgcttcttggccctttgtgtatcctctagaaagagatgtctagtcacatcatcctttacccaaatttaaaatatatttatcttaatattgaattgtaagttatttacaagtgccttatcagatatcatttgtaaatattttgttccattctgcacattctcttttcgcttccgtgatatccgttgaagcacagaagtgtttcattgtacttacagtcgatttttctttttcacctgtgccttggtgttgtatctgagaaaccatcgcctatccaaggtcacgaagacttgcccctgtcttttctcctaggagggttataatttgatctcttccatgtagatccatgtaagatccattttgagttaaattttatacatgatgtgaggtaggggtccatcttcatccatccaactggaaatccagttgtcccagcagcatttgttgaagagactattttttcccattgagcccatcttattacacagtatattcaaattcacagttgtgaaaaatattatacaaaacactgtctccccactactgttggctgtggaattggcaccacttttctggcagccatctgttgccaagtgaactcaaagccttcaaaatgctcctatggccgccatcggacatggccatgactgtggcagcctaaagcaacagaactattttctctgcattctgggccagaagtctgaacccacggtgtgggcagggctgtgttcctttcgaggccctaggagaggacccttccttggcttttccagcttctgatggttccagaagcctcctggcttggggcagcgtcaccccatctctgcctctgtcttcatggggacttctcctctgtgtccccttctgtgtcttttaagaacaatttttaaaacttaatcccaaaagtaaagacctcatttgcaaagaaggtcccattccgaggttccaggtagacatgagtctggggggcacccgccgctccgccctgggtctgcagggggccttctcctggtgcctcctgcctgctgtgccctccatgctgcttctttgacccggttgccttccatcctcctgggcccctcaggctctcagcttcccatcttctctaagacatgtctgctccatcattctggtgtctctctcttccctccttcctggcacctgacacgtttgttaccccacttgtggggtgttgctgtctgatcaccatcttccttccaagggtaggggaaagggccctggctggttcaagtcacagctctgtcctcagcgccaggcacagtgcccagctcactggcacagcctcagattccctggacacctggctccccggctgcattttttaccattgggataagttattagtaccattgaaaattaatacctggggattctcttaatattgttcatattcatgttcttctcagcagttttaccatgaggaatctgtcttaaacaatgtcagttgtcaatagcgttatttaaaatagcaacaacaataaaaaaaggtggtcagacctggcagcttgtgcctgtaatcccagcacttggagaagccaaagcggggggatcatttcagctcaggagtttgagaccagtctggccaaaatagcaagacctttgtctctattaaaaaaaaaaatgccaggcacagtgacacatgcctgtaatcccaagcactttgggaggccgaggtgggcagatcacctgaggtcaggagctcaagaccagcctggccaacatggcaaaaacccgtttctactaaaaatacaaaaattagccaggcatggtggtgggcacctgtcatcccagctacttgggaggctgagtcaggagaatcactggaacctaggagttggagtttgtagtgagccaagatcgcaccactgcactccagcctgggcgacagaatgagaccctgtctctgaaaaaaagggaaatgacctaaatgcccaagaacaaggggaggctaaattagggcacgttgtgcactgaaacactaaacagacattaaaaaattttgttgtagaaaattacaggaaaagatatccatgacacagccagcagtgtggcacgtgggctacaattccagcgtggccttcagttctgcacacgtgcgtcaaaggtggggagagttctggtggtgggtggcgctgagggctgcacaacactggggacgtgcctaatgcccctgaactgtgtactaaaacatggctgctttggtaaattttatgttatatatgatttataatatatttttttaaatgcccagctactcaggaggctaagatgggaagatcacttgagcccaggagttaaagtccaaccagggcaatgtagcaagaccacatgtctaagaaaatttaaaaatcggctgggcgcggtggctcacgcctgtaatcccagcactttgagaggccgacatgggtggatcacgaggttaagagattaagaccatcctggccaacatggtaaaaccctgtctctactaaaaataccaaaattagctggacgtggtggtgggcgcctgtagtcccagctactcaggagggtgagggaggagaatcgcttgaaccaggaaggtggaggttgcagtgagctgagattgcaccactgcactccagcctggtgacagagcgagactgcgtctcaacaacaacaaaaaagaaaatttaaaaataatttttcatacaaaaattagccaggtgtggtggcacgtacctgtaatcccaggtacttgggaggctgaagcaggagaattgcttgaacccaggaggcggaggttgcagtgagccgagattgcaccactgcactccaacctcggtgacaagagcgaaactccgtctcaaaaatataaaaataatttttaaaatgtcttaaaaaggccgggtgtggtggctcacacctgtaatcccagcactttgggaggccgaggcgggcagatcacaaggtcaagagtttgagaccatcctgaccaacatggtgaaaccctgtctctactaaaaatacaaaaattagctaggcgtggtggtttgcgcctgtaatcccagctactcaggaggctgaggcaggagagttgcttgaacccaggaggcggaggttgcagtgagccaagatcatgccactgcactccagcctggtgacagagtgagactccgtctccaaaaaaaaaaaaaaaaaaatcttaaaaagaagaaatagatggaggccaggcccagtggcttatatctgtaatcctagcactttgggaggctaagatgggagcactgcttgagaccaggagttcaagaccagcctgggcaatattatgagaccccgtatctacaaaaaatttttttaattagctgagtgtggtgacacgtgcctgtagtcccagctacttaggaggctgaggtgggaggatctcttgagccctgggagttcaagactgcagtgagctatgatggtgccactgcactccagcctgggcaacaggtcgagaccctgtctctaaaaataaataagtaaataaaagaaatagatggggagagtgtggaacagaggtgtcaacatcacctccgggtgaagggatttcaggagcacgttcttttctgtacagagaagatagttctttttttttggtcaagaaattcaaccattagttttttaaagacaagcttgggtggggtgcctgctgggggcagtgctggtctttcactgcagcccaggcaccccttgagagtcccagtgtgtgttatgccccgagccagtcaagctgaagggagagcgggtgcgggggccctcctccgtgtcccagcccggcccctgggattgcgtcgcggcctctgcttgtcgacctgggtgctggctgtcctattttactactattgaccctgaaggccatcgaggagggcacgctggaggagatcgaagaggaggtccggcagaagaaatcatcacggaagcgcaagcgagacagcgacgccggctcctccaccccgaccaccagcacccgcagccgcgacaaggacgacgagagcaagaagcagaagaagcgcgggcggccgcctgccgagaaactctcccctaacccacccaacctcaccaagaagatgaagaagattgtggatgccgtgatcaagtacaaggacaggtaagcgaggaggcggggagggcgggggctgtaggggtccccgtgggagcaggcctggcatctgcactctgactctgcacactcaggcttgggccgctcactctttcactcatccacaaacactgactgaatctctgtgtctttgagcctggccctgaggaacatgctttctggaacagggaagcacacatgtatctgcggtgatgagagggaatgtcacatgtggtcgagaggagaggcaggggtgcgggtctcggagaaggggacattgcagcagagccttgagagaggggaggttggggagagtgcaccagcagaggccacagcaggcggagaggctctgccaaagttgtggcctggtggcctcaagggatgaggtgggatgaggggttatatggcagtaatgggtgctgcccgtgtggccaggaggttggggacaagaggctggcatgtctggagcagagaaagtggcagccctctcctgtccttgcaccctcccaggctacctgtgccatctctgtgttggtgagatggtggccacactcctgctctctgccaggccctgctccaagcctggagatcgctgtcctcacagacatgtcctatatacgaggcagcatgcggttccagctgtggccacggcccagcggcggatcataacgtgttggtggatcatgagtgccatttatatgtttttcatttactaatatccttttccgtgagcgactctatatgggtaccatttaaataagaagaaaggaatgttctcagcaactccccagggaggcatgtgcaccttctgccagcccagggcaggtcacagagctgggcaggagccagcaaaggtgtaaggcccatgcctggcccaggactcacccagtcttccactctccaaggtcttatttcacttcctggtacacactggccagtacggctgtccccgtaatgggagggttgtactgtttgattttaaataacagtttgctgttagtcatgaagcagagcgtgggggaattgtatctgttggaggggaaagtgaagggagcccacatgcatggtttggagagaatcttaccaagtgtgaagttttagaggatggtaacaattggagtgcctaaattaatgagtcaaaattaccgcgcaaggccagctgtggtggtccacacctgtcagcccagcactttgagaggctgaggtgggaggatcacttgaggtcaggagtttgagaccagcatggacaacatggtgaaaacccatctttactgaaaataggaaaacaattacctgggcgtggtggcacgctttttgggaggctgagacaggagaatcacttgaacccaggaagtggaggttgctgtggaccaagattgcaccactgcactccagccttgggtgacagagcaagacgcccactccaaaaacaaaatactgcttaaaaaggttcttttagccagatgcggtggctcatgcctgtaatcccagcactttaggaggccaaggcgggcggatcacttgaggtcaggagtttgaaaccagcatggccaatatggcgaaaccccctctctactaaaactacaaaaattcgccgagcgtagtggtgcatgcctgtaatcccagctactcgggaggctgaggtaggagaatcttgaagctgggaggcggaggttgcagtgacccaagatcacatcagtgcactccagcctgggggacagagtgagactccgtctcaaaaagagaaaaaaagaaaggttcttttattattggaagagaaacagatgatgaaggaaaggagacatattcaagttcaatgccagatctgaaaatgtcatgtgttgtcagtattgagaaaaaaatatatagactctaattcacaaacctaactccaaggctaagtcctcaaagaggaaagcaagtggaggacttaagttacttaaagtgcgggatacagctgcgggcagtagcacatgcctggggtccccactacttgggaggctgaggtgggaggatcacttgagcacagcaggtccaggctacagtgagccatgatcacacagctgcactccatcctgggtgatggaatgagaccctgtatcttaaaaaaatgaaataaatacagaatacttatttaaaacatgggccaggtatagtggctcgtgtaatcccagcactttgggaggctgaggtgggcggatcacttgaagttaggagtttgagaccagtctggccaacatggcaaaaccccatctctacaaaaaatacaaaaatagaaattaaactggcatggtgatgcgtgcttgagctcccagctcgggaggctgggcacgagaatcgcttgaacccagaaggcagagggtgcagtgagccaagattgcaccactgcactccagcctgggtgacagagtgagacaatacctgaaaaacaaaaaacaaaaacaaaaaaagggaattcgcagaaatctaatgacaatgacagaccctccccatgttttatttctaatgataatcttgtgagggaaacttaacattaccaacctaaagaagacccttgaagcgcagtggggaaagcacgggtgtctccatcacactggtctcctgggtatccacgtagagaggatgagcctcgaccacccccacacacgcacacaccatgcacttggatccacgtgacatggactgtggatgtaagaacgtgaaaggtaaaacaaaattctagaagaaagcacgggagaaaatcttcatgagtaggcatcgatttcttccacgggagccaaaagccactaatcacaaacaattgagaaattagacctcactgaaattaataacatctgtttattaatggacacgctgatggagacagtgaaaactcctcatagatgaggaaaagacaacacaatttaaagctggacaagagccgggaacagacgcctccttacacaggacatcccaggactaatcaatgtggggaaaggtgctcacgtcattgcattagcatcacaacttcaagaaaatgctcgttaaaaccagagtgacttgcaccagcacccgccccagaacggccgaatgcccatcagtgctggcaagtctgaagcagtctggcctcacaccctgcgtgtaggagtatgcagctctttggcaatctcttctgttttgctttgtttgtttttaaccatcgaactgcagaagataatattttctgaggctcagcctgtacataccctctgacccagcagcctgcagccctcgttctacccaggagagctgagtgcatctgtccacaccgacagacgtgtccatagccactttggtcataatctcccaaaacaagaatcagcccagtgtccatctacaggggcatggatcagtggaggcctaatcgtacagggccccaaacagctgtgaaaacagacatagtactgctacctggaagaagcttacattttgttgagtgaaagaagccagacactaaaaagggcatactggccgggcacggtggctcacgcctgtaatcccagcactttgggaggccgaggcgggcggatcacgaggtcaggagattgagaccatcctggctaacatggtgaaacaccgtctctactaaaaatacaaaaaattagccgggtgtggtggtgggcgcctgtagtcccagctactcgggaggctgaggcgggagaatggcatgaacccaggaggcggagcttgcagtgagccgagaccgcgccacggcactccagcctgggcgacagagcgggactccgtctaaaaaaaaaaagagggcctactgtgtgcctccagttctgtgagggtcagaagctgatccacagtaatggctgccaagcagtgcttaccttgagagagggaatagcaggaaagccacacgacgagccttctaggatactggggatattctctctatagatctggatgtgtatatgatgtgtacattcaccaaggtgtacacatgagatatgtacacttctctgtattccattacaccttggtttttgaaaagacagaaacagcatgctcagcttattaagaacctgaatattttcagacaaaaagtatgtctagtgttagtccacttttttttttttttagttttagactcacagagccctcttagggtcatatttagttgtatatcatctgacaaaagagggaatggctcacccagctgctacagtcagtcttgtagcctttgtaagatttgatgataaatcatacaataaattaaaactttcggctgggcacagtggctcacgcccataatcccagcactttgggaggccgaggcggaggatcacttgagcccaggagttcagatgagcctggccaacatagtgagactctgtctctatttaaaaaaaagaagaaaaaaaaagtctgggtgtggtggctcacgcctgtaatcccagcactttgggaggctgaggcgagcggatcacaaggccaggagatcaagaccatgctggctaacacagtgaaaccccgtctctactaaaaatacaaaaaattagccaggcgtggtggcgggcgcctgtagtcccagatactcgagaggctgaggcaggagaatggcgtgaacccgggaggcagagcttgcagtgagccgagattgtgccactgcactccagcctgggcgacagagcgagactccgtctcaaaaaaaaaaaaaaaaccccaaa

SEQ ID NO: 12796 - DNA, 5088 bp, Homo sapiens; identical to SEQ ID NO: 7545
  SITE (5): n equals a,t,g, or c
  SITE (6): n equals a,t,g, or c
  SITE (7): n equals a,t,g, or c
  SITE (8): n equals a,t,g, or c
  SITE (9): n equals a,t,g, or c
  SITE (10): n equals a,t,g, or c
  SITE (11): n equals a,t,g, or c
  SITE (12): n equals a,t,g, or c
  SITE (13): n equals a,t,g, or c
  SITE (14): n equals a,t,g, or c
  SITE (15): n equals a,t,g, or c
  SITE (16): n equals a,t,g, or c
  SITE (17): n equals a,t,g, or c
  SITE (18): n equals a,t,g, or c
  SITE (19): n equals a,t,g, or c
  SITE (20): n equals a,t,g, or c
  SITE (21): n equals a,t,g, or c
  SITE (22): n equals a,t,g, or c
  SITE (23): n equals a,t,g, or c
  SITE (24): n equals a,t,g, or c
  SITE (25): n equals a,t,g, or c
  SITE (26): n equals a,t,g, or c
  SITE (27): n equals a,t,g, or c
  SITE (28): n equals a,t,g, or c
  SITE (29): n equals a,t,g, or c
  SITE (30): n equals a,t,g, or c
  SITE (31): n equals a,t,g, or c
  SITE (32): n equals a,t,g, or c
  SITE (33): n equals a,t,g, or c
  SITE (34): n equals a,t,g, or c
  SITE (35): n equals a,t,g, or c
  SITE (36): n equals a,t,g, or c
  SITE (37): n equals a,t,g, or c
  SITE (38): n equals a,t,g, or c
  SITE (39): n equals a,t,g, or c
  SITE (40): n equals a,t,g, or c
  SITE (41): n equals a,t,g, or c
  SITE (42): n equals a,t,g, or c
  SITE (43): n equals a,t,g, or c
  SITE (44): n equals a,t,g, or c
  SITE (45): n equals a,t,g, or c
  SITE (46): n equals a,t,g, or c
  SITE (47): n equals a,t,g, or c
  SITE (48): n equals a,t,g, or c
  SITE (49): n equals a,t,g, or c
  SITE (50): n equals a,t,g, or c
  SITE (51): n equals a,t,g, or c
  SITE (52): n equals a,t,g, or c
  SITE (53): n equals a,t,g, or c
  SITE (54): n equals a,t,g, or c
  SITE (55): n equals a,t,g, or c
  SITE (56): n equals a,t,g, or c
  SITE (57): n equals a,t,g, or c
  SITE (58): n equals a,t,g, or c
  SITE (59): n equals a,t,g, or c
  SITE (60): n equals a,t,g, or c
  SITE (61): n equals a,t,g, or c
  SITE (62): n equals a,t,g, or c
  SITE (63): n equals a,t,g, or c
  SITE (64): n equals a,t,g, or c
  SITE (65): n equals a,t,g, or c
  SITE (66): n equals a,t,g, or c
  SITE (67): n equals a,t,g, or c
  SITE (68): n equals a,t,g, or c
  SITE (69): n equals a,t,g, or c
  SITE (70): n equals a,t,g, or c
  SITE (71): n equals a,t,g, or c
  SITE (72): n equals a,t,g, or c
  SITE (73): n equals a,t,g, or c
  SITE (74): n equals a,t,g, or c
  SITE (75): n equals a,t,g, or c
  SITE (76): n equals a,t,g, or c
  SITE (77): n equals a,t,g, or c
  SITE (78): n equals a,t,g, or c
  SITE (79): n equals a,t,g, or c
  SITE (80): n equals a,t,g, or c
  SITE (81): n equals a,t,g, or c
  SITE (82): n equals a,t,g, or c
  SITE (83): n equals a,t,g, or c
  SITE (84): n equals a,t,g, or c
  SITE (85): n equals a,t,g, or c
  SITE (86): n equals a,t,g, or c
  SITE (87): n equals a,t,g, or c
  SITE (88): n equals a,t,g, or c
  SITE (89): n equals a,t,g, or c
  SITE (90): n equals a,t,g, or c
  SITE (91): n equals a,t,g, or c
  SITE (92): n equals a,t,g, or c
  SITE (93): n equals a,t,g, or c
  SITE (94): n equals a,t,g, or c
  SITE (95): n equals a,t,g, or c
  SITE (96): n equals a,t,g, or c
  SITE (97): n equals a,t,g, or c
  SITE (98): n equals a,t,g, or c
  SITE (99): n equals a,t,g, or c
  SITE (100): n equals a,t,g, or c
  SITE (101): n equals a,t,g, or c
  SITE (102): n equals a,t,g, or c
  SITE (103): n equals a,t,g, or c
  SITE (104): n equals a,t,g, or c
  SITE (105): n equals a,t,g, or c
  SITE (106): n equals a,t,g, or c
  SITE (107): n equals a,t,g, or c
  SITE (108): n equals a,t,g, or c
  SITE (109): n equals a,t,g, or c
  SITE (110): n equals a,t,g, or c
  SITE (111): n equals a,t,g, or c
  SITE (112): n equals a,t,g, or c
  SITE (113): n equals a,t,g, or c
  SITE (114): n equals a,t,g, or c
  SITE (115): n equals a,t,g, or c
  SITE (116): n equals a,t,g, or c
  SITE (117): n equals a,t,g, or c
  SITE (118): n equals a,t,g, or c
  SITE (119): n equals a,t,g, or c
  SITE (120): n equals a,t,g, or c
  SITE (121): n equals a,t,g, or c
  SITE (122): n equals a,t,g, or c
  SITE (123): n equals a,t,g, or c
  SITE (124): n equals a,t,g, or c
  SITE (125): n equals a,t,g, or c
  SITE (126): n equals a,t,g, or c
  SITE (127): n equals a,t,g, or c
  SITE (128): n equals a,t,g, or c
  SITE (129): n equals a,t,g, or c
  SITE (130): n equals a,t,g, or c
  SITE (131): n equals a,t,g, or c
  SITE (132): n equals a,t,g, or c
  SITE (133): n equals a,t,g, or c
  SITE (134): n equals a,t,g, or c
  SITE (135): n equals a,t,g, or c
  SITE (136): n equals a,t,g, or c
  SITE (137): n equals a,t,g, or c
  SITE (138): n equals a,t,g, or c
  SITE (139): n equals a,t,g, or c
  SITE (140): n equals a,t,g, or c
  SITE (141): n equals a,t,g, or c
  SITE (142): n equals a,t,g, or c
  SITE (143): n equals a,t,g, or c
  SITE (144): n equals a,t,g, or c
  SITE (145): n equals a,t,g, or c
  SITE (146): n equals a,t,g, or c
  SITE (147): n equals a,t,g, or c
  SITE (148): n equals a,t,g, or c
  SITE (149): n equals a,t,g, or c
  SITE (150): n equals a,t,g, or c
  SITE (151): n equals a,t,g, or c
  SITE (152): n equals a,t,g, or c
  SITE (153): n equals a,t,g, or c
  SITE (154): n equals a,t,g, or c
  SITE (155): n equals a,t,g, or c
  SITE (156): n equals a,t,g, or c
  SITE (157): n equals a,t,g, or c
  SITE (158): n equals a,t,g, or c
  SITE (159): n equals a,t,g, or c
  SITE (160): n equals a,t,g, or c
  SITE (161): n equals a,t,g, or c
  SITE (162): n equals a,t,g, or c
  SITE (163): n equals a,t,g, or c
  SITE (164): n equals a,t,g, or c
  SITE (165): n equals a,t,g, or c
  SITE (166): n equals a,t,g, or c
  SITE (167): n equals a,t,g, or c
  SITE (168): n equals a,t,g, or c
  SITE (169): n equals a,t,g, or c
  SITE (170): n equals a,t,g, or c
  SITE (171): n equals a,t,g, or c
  SITE (172): n equals a,t,g, or c
  SITE (173): n equals a,t,g, or c
  SITE (174): n equals a,t,g, or c
  SITE (175): n equals a,t,g, or c
  SITE (176): n equals a,t,g, or c
  SITE (177): n equals a,t,g, or c
  SITE (178): n equals a,t,g, or c
  SITE (179): n equals a,t,g, or c
  SITE (180): n equals a,t,g, or c
  SITE (181): n equals a,t,g, or c
  SITE (182): n equals a,t,g, or c
  SITE (183): n equals a,t,g, or c
  SITE (184): n equals a,t,g, or c
  SITE (185): n equals a,t,g, or c
  SITE (186): n equals a,t,g, or c
  SITE (187): n equals a,t,g, or c
  SITE (188): n equals a,t,g, or c
  SITE (189): n equals a,t,g, or c
  SITE (190): n equals a,t,g, or c
  SITE (191): n equals a,t,g, or c
  SITE (192): n equals a,t,g, or c
  SITE (193): n equals a,t,g, or c
  SITE (194): n equals a,t,g, or c
  SITE (195): n equals a,t,g, or c
  SITE (196): n equals a,t,g, or c
  SITE (197): n equals a,t,g, or c
  SITE (198): n equals a,t,g, or c
  SITE (199): n equals a,t,g, or c
  SITE (200): n equals a,t,g, or c
  SITE (201): n equals a,t,g, or c
  SITE (202): n equals a,t,g, or c
  SITE (203): n equals a,t,g, or c
  SITE (204): n equals a,t,g, or c
  SITE (205): n equals a,t,g, or c
  SITE (206): n equals a,t,g, or c
  SITE (207): n equals a,t,g, or c
  SITE (208): n equals a,t,g, or c
  SITE (209): n equals a,t,g, or c
  SITE (210): n equals a,t,g, or c
  SITE (211): n equals a,t,g, or c
  SITE (212): n equals a,t,g, or c
  SITE (213): n equals a,t,g, or c
  SITE (214): n equals a,t,g, or c
  SITE (215): n equals a,t,g, or c
  SITE (216): n equals a,t,g, or c
  SITE (217): n equals a,t,g, or c
  SITE (218): n equals a,t,g, or c
  SITE (219): n equals a,t,g, or c
  SITE (220): n equals a,t,g, or c
  SITE (221): n equals a,t,g, or c
  SITE (222): n equals a,t,g, or c
  SITE (223): n equals a,t,g, or c
  SITE (224): n equals a,t,g, or c
  SITE (225): n equals a,t,g, or c
  SITE (226): n equals a,t,g, or c
  SITE (227): n equals a,t,g, or c
  SITE (228): n equals a,t,g, or c
  SITE (229): n equals a,t,g, or c
  SITE (230): n equals a,t,g, or c
  SITE (231): n equals a,t,g, or c
  SITE (232): n equals a,t,g, or c
  SITE (233): n equals a,t,g, or c
  SITE (234): n equals a,t,g, or c
  SITE (235): n equals a,t,g, or c
  SITE (236): n equals a,t,g, or c
  SITE (237): n equals a,t,g, or c
  SITE (238): n equals a,t,g, or c
  SITE (239): n equals a,t,g, or c
  SITE (240): n equals a,t,g, or c
  SITE (241): n equals a,t,g, or c
  SITE (242): n equals a,t,g, or c
  SITE (243): n equals a,t,g, or c
  SITE (244): n equals a,t,g, or c
  SITE (245): n equals a,t,g, or c
  SITE (246): n equals a,t,g, or c
  SITE (247): n equals a,t,g, or c
  SITE (248): n equals a,t,g, or c
  SITE (249): n equals a,t,g, or c
  SITE (250): n equals a,t,g, or c
  SITE (251): n equals a,t,g, or c
  SITE (252): n equals a,t,g, or c
  SITE (253): n equals a,t,g, or c
  SITE (254): n equals a,t,g, or c
  SITE (255): n equals a,t,g, or c
  SITE (256): n equals a,t,g, or c
  SITE (257): n equals a,t,g, or c
  SITE (258): n equals a,t,g, or c
  SITE (259): n equals a,t,g, or c
  SITE (260): n equals a,t,g, or c
  SITE (261): n equals a,t,g, or c
  SITE (262): n equals a,t,g, or c
  SITE (263): n equals a,t,g, or c
  SITE (264): n equals a,t,g, or c
  SITE (265): n equals a,t,g, or c
  SITE (266): n equals a,t,g, or c
  SITE (267): n equals a,t,g, or c
  SITE (268): n equals a,t,g, or c
  SITE (269): n equals a,t,g, or c
  SITE (270): n equals a,t,g, or c
  SITE (271): n equals a,t,g, or c
  SITE (272): n equals a,t,g, or c
  SITE (273): n equals a,t,g, or c
  SITE (274): n equals a,t,g, or c
  SITE (275): n equals a,t,g, or c
  SITE (276): n equals a,t,g, or c
  SITE (277): n equals a,t,g, or c
  SITE (278): n equals a,t,g, or c
  SITE (279): n equals a,t,g, or c
  SITE (280): n equals a,t,g, or c
  SITE (281): n equals a,t,g, or c
  SITE (282): n equals a,t,g, or c
  SITE (283): n equals a,t,g, or c
  SITE (284): n equals a,t,g, or c
  SITE (285): n equals a,t,g, or c
  SITE (286): n equals a,t,g, or c
  SITE (287): n equals a,t,g, or c
  SITE (288): n equals a,t,g, or c
  SITE (289): n equals a,t,g, or c
  SITE (290): n equals a,t,g, or c
  SITE (291): n equals a,t,g, or c
  SITE (292): n equals a,t,g, or c
  SITE (293): n equals a,t,g, or c
  SITE (294): n equals a,t,g, or c
  SITE (295): n equals a,t,g, or c
  SITE (296): n equals a,t,g, or c
  SITE (297): n equals a,t,g, or c
  SITE (298): n equals a,t,g, or c
  SITE (299): n equals a,t,g, or c
  SITE (300): n equals a,t,g, or c
  SITE (301): n equals a,t,g, or c
  SITE (302): n equals a,t,g, or c
  SITE (303): n equals a,t,g, or c
  SITE (304): n equals a,t,g, or c
  SITE (3943): n equals a,t,g, or c
  SITE (3944): n equals a,t,g, or c
  SITE (3945): n equals a,t,g, or c
  SITE (3946): n equals a,t,g, or c
  SITE (3947): n equals a,t,g, or c
  SITE (3948): n equals a,t,g, or c
  SITE (3949): n equals a,t,g, or c
  SITE (3950): n equals a,t,g, or c
  SITE (3951): n equals a,t,g, or c
  SITE (3952): n equals a,t,g, or c
  SITE (3953): n equals a,t,g, or c
  SITE (3954): n equals a,t,g, or c
  SITE (3955): n equals a,t,g, or c
  SITE (3956): n equals a,t,g, or c
  SITE (3957): n equals a,t,g, or c
  SITE (3958): n equals a,t,g, or c
  SITE (3959): n equals a,t,g, or c
  SITE (3960): n equals a,t,g, or c
  SITE (3961): n equals a,t,g, or c
  SITE (3962): n equals a,t,g, or c
  SITE (3963): n equals a,t,g, or c
  SITE (3964): n equals a,t,g, or c
  SITE (3965): n equals a,t,g, or c
  SITE (3966): n equals a,t,g, or c
  SITE (3967): n equals a,t,g, or c
  SITE (3968): n equals a,t,g, or c
  SITE (3969): n equals a,t,g, or c
  SITE (3970): n equals a,t,g, or c
  SITE (3971): n equals a,t,g, or c
  SITE (3972): n equals a,t,g, or c
  SITE (3973): n equals a,t,g, or c
  SITE (3974): n equals a,t,g, or c
  SITE (3975): n equals a,t,g, or c
  SITE (3976): n equals a,t,g, or c
  SITE (3977): n equals a,t,g, or c
  SITE (3978): n equals a,t,g, or c
  SITE (3979): n equals a,t,g, or c
  SITE (3980): n equals a,t,g, or c
  SITE (3981): n equals a,t,g, or c
  SITE (3982): n equals a,t,g, or c
  SITE (3983): n equals a,t,g, or c
  SITE (3984): n equals a,t,g, or c
  SITE (3985): n equals a,t,g, or c
  SITE (3986): n equals a,t,g, or c
  SITE (3987): n equals a,t,g, or c
  SITE (3988): n equals a,t,g, or c
  SITE (3989): n equals a,t,g, or c
  SITE (3990): n equals a,t,g, or c
  SITE (3991): n equals a,t,g, or c
  SITE (3992): n equals a,t,g, or c
  SITE (3993): n equals a,t,g, or c
  SITE (3994): n equals a,t,g, or c
  SITE (3995): n equals a,t,g, or c
  SITE (3996): n equals a,t,g, or c
  SITE (3997): n equals a,t,g, or c
  SITE (3998): n equals a,t,g, or c
  SITE (3999): n equals a,t,g, or c
  SITE (4000): n equals a,t,g, or c
  SITE (4001): n equals a,t,g, or c
  SITE (4002): n equals a,t,g, or c
  SITE (4003): n equals a,t,g, or c
  SITE (4004): n equals a,t,g, or c
  SITE (4005): n equals a,t,g, or c
  SITE (4006): n equals a,t,g, or c
  SITE (4007): n equals a,t,g, or c
  SITE (4008): n equals a,t,g, or c
  SITE (4009): n equals a,t,g, or c
  SITE (4010): n equals a,t,g, or c
  SITE (4011): n equals a,t,g, or c
  SITE (4012): n equals a,t,g, or c
  SITE (4013): n equals a,t,g, or c
  SITE (4014): n equals a,t,g, or c
  SITE (4015): n equals a,t,g, or c
  SITE (4016): n equals a,t,g, or c
  SITE (4017): n equals a,t,g, or c
  SITE (4018): n equals a,t,g, or c
  SITE (4019): n equals a,t,g, or c
  SITE (4020): n equals a,t,g, or c
  SITE (4021): n equals a,t,g, or c
  SITE (4022): n equals a,t,g, or c
  SITE (4023): n equals a,t,g, or c
  SITE (4024): n equals a,t,g, or c
  SITE (4025): n equals a,t,g, or c
  SITE (4026): n equals a,t,g, or c
  SITE (4027): n equals a,t,g, or c
  SITE (4028): n equals a,t,g, or c
  SITE (4029): n equals a,t,g, or c
  SITE (4030): n equals a,t,g, or c
  SITE (4031): n equals a,t,g, or c
  SITE (4032): n equals a,t,g, or c
  SITE (4033): n equals a,t,g, or c
  SITE (4034): n equals a,t,g, or c
  SITE (4035): n equals a,t,g, or c
  SITE (4036): n equals a,t,g, or c
  SITE (4037): n equals a,t,g, or c
  SITE (4038): n equals a,t,g, or c
  SITE (4039): n equals a,t,g, or c
  SITE (4040): n equals a,t,g, or c
  SITE (4041): n equals a,t,g, or c
  SITE (4042): n equals a,t,g, or c
  SITE (4043): n equals a,t,g, or c
  SITE (4044): n equals a,t,g, or c
  SITE (4045): n equals a,t,g, or c
  SITE (4046): n equals a,t,g, or c
  SITE (4047): n equals a,t,g, or c
  SITE (4048): n equals a,t,g, or c
  SITE (4049): n equals a,t,g, or c
  SITE (4050): n equals a,t,g, or c
  SITE (4051): n equals a,t,g, or c
  SITE (4052): n equals a,t,g, or c
  SITE (4053): n equals a,t,g, or c
  SITE (4054): n equals a,t,g, or c
  SITE (4055): n equals a,t,g, or c
  SITE (4056): n equals a,t,g, or c
  SITE (4057): n equals a,t,g, or c
  SITE (4058): n equals a,t,g, or c
  SITE (4059): n equals a,t,g, or c
  SITE (4060): n equals a,t,g, or c
  SITE (4061): n equals a,t,g, or c
  SITE (4062): n equals a,t,g, or c
  SITE (4063): n equals a,t,g, or c
  SITE (4064): n equals a,t,g, or c
  SITE (4065): n equals a,t,g, or c
  SITE (4066): n equals a,t,g, or c
  SITE (4067): n equals a,t,g, or c
  SITE (4068): n equals a,t,g, or c
  SITE (4069): n equals a,t,g, or c
  SITE (4070): n equals a,t,g, or c
  SITE (4071): n equals a,t,g, or c
  SITE (4072): n equals a,t,g, or c
  SITE (4073): n equals a,t,g, or c
  SITE (4074): n equals a,t,g, or c
  SITE (4075): n equals a,t,g, or c
  SITE (4076): n equals a,t,g, or c
  SITE (4077): n equals a,t,g, or c
  SITE (4078): n equals a,t,g, or c
  SITE (4079): n equals a,t,g, or c
  SITE (4080): n equals a,t,g, or c
  SITE (4081): n equals a,t,g, or c
  SITE (4082): n equals a,t,g, or c
  SITE (4083): n equals a,t,g, or c
  SITE (4084): n equals a,t,g, or c
  SITE (4085): n equals a,t,g, or c
  SITE (4086): n equals a,t,g, or c
  SITE (4087): n equals a,t,g, or c
  SITE (4088): n equals a,t,g, or c
  SITE (4089): n equals a,t,g, or c
  SITE (4090): n equals a,t,g, or c
  SITE (4091): n equals a,t,g, or c
  SITE (4092): n equals a,t,g, or c
  SITE (4093): n equals a,t,g, or c
  SITE (4094): n equals a,t,g, or c
  SITE (4095): n equals a,t,g, or c
  SITE (4096): n equals a,t,g, or c
  SITE (4097): n equals a,t,g, or c
  SITE (4098): n equals a,t,g, or c
  SITE (4099): n equals a,t,g, or c
  SITE (4100): n equals a,t,g, or c
  SITE (4101): n equals a,t,g, or c
  SITE (4102): n equals a,t,g, or c
  SITE (4103): n equals a,t,g, or c
  SITE (4104): n equals a,t,g, or c
  SITE (4105): n equals a,t,g, or c
  SITE (4106): n equals a,t,g, or c
  SITE (4107): n equals a,t,g, or c
  SITE (4108): n equals a,t,g, or c
  SITE (4109): n equals a,t,g, or c
  SITE (4110): n equals a,t,g, or c
  SITE (4111): n equals a,t,g, or c
  SITE (4112): n equals a,t,g, or c
  SITE (4113): n equals a,t,g, or c
  SITE (4114): n equals a,t,g, or c
  SITE (4115): n equals a,t,g, or c
  SITE (4116): n equals a,t,g, or c
  SITE (4117): n equals a,t,g, or c
  SITE (4118): n equals a,t,g, or c
  SITE (4119): n equals a,t,g, or c
  SITE (4120): n equals a,t,g, or c
  SITE (4121): n equals a,t,g, or c
  SITE (4122): n equals a,t,g, or c
  SITE (4123): n equals a,t,g, or c
  SITE (4124): n equals a,t,g, or c
  SITE (4125): n equals a,t,g, or c
  SITE (4126): n equals a,t,g, or c
  SITE (4127): n equals a,t,g, or c
  SITE (4128): n equals a,t,g, or c
  SITE (4129): n equals a,t,g, or c
  SITE (4130): n equals a,t,g, or c
  SITE (4131): n equals a,t,g, or c
  SITE (4132): n equals a,t,g, or c
  SITE (4133): n equals a,t,g, or c
  SITE (4134): n equals a,t,g, or c
  SITE (4135): n equals a,t,g, or c
  SITE (4136): n equals a,t,g, or c
  SITE (4137): n equals a,t,g, or c
  SITE (4138): n equals a,t,g, or c
  SITE (4139): n equals a,t,g, or c
  SITE (4140): n equals a,t,g, or c
  SITE (4141): n equals a,t,g, or c
  SITE (4142): n equals a,t,g, or c
  SITE (4143): n equals a,t,g, or c
  SITE (4144): n equals a,t,g, or c
  SITE (4145): n equals a,t,g, or c
  SITE (4146): n equals a,t,g, or c
  SITE (4147): n equals a,t,g, or c
  SITE (4148): n equals a,t,g, or c
  SITE (4149): n equals a,t,g, or c
  SITE (4150): n equals a,t,g, or c
  SITE (4151): n equals a,t,g, or c
  SITE (4152): n equals a,t,g, or c
  SITE (4153): n equals a,t,g, or c
  SITE (4154): n equals a,t,g, or c
  SITE (4155): n equals a,t,g, or c
  SITE (4156): n equals a,t,g, or c
  SITE (4157): n equals a,t,g, or c
  SITE (4158): n equals a,t,g, or c
  SITE (4159): n equals a,t,g, or c
  SITE (4160): n equals a,t,g, or c
  SITE (4161): n equals a,t,g, or c
  SITE (4162): n equals a,t,g, or c
  SITE (4163): n equals a,t,g, or c
  SITE (4164): n equals a,t,g, or c
  SITE (4165): n equals a,t,g, or c
  SITE (4166): n equals a,t,g, or c
  SITE (4167): n equals a,t,g, or c
  SITE (4168): n equals a,t,g, or c
  SITE (4169): n equals a,t,g, or c
  SITE (4170): n equals a,t,g, or c
  SITE (4171): n equals a,t,g, or c
  SITE (4172): n equals a,t,g, or c
  SITE (4173): n equals a,t,g, or c
  SITE (4174): n equals a,t,g, or c
  SITE (4175): n equals a,t,g, or c
  SITE (4176): n equals a,t,g, or c
  SITE (4177): n equals a,t,g, or c
  SITE (4178): n equals a,t,g, or c
  SITE (4179): n equals a,t,g, or c
  SITE (4180): n equals a,t,g, or c
  SITE (4181): n equals a,t,g, or c
  SITE (4182): n equals a,t,g, or c
  SITE (4183): n equals a,t,g, or c
  SITE (4184): n equals a,t,g, or c
  SITE (4185): n equals a,t,g, or c
  SITE (4186): n equals a,t,g, or c
  SITE (4187): n equals a,t,g, or c
  SITE (4188): n equals a,t,g, or c
  SITE (4189): n equals a,t,g, or c
  SITE (4190): n equals a,t,g, or c
  SITE (4191): n equals a,t,g, or c
  SITE (4192): n equals a,t,g, or c
  SITE (4193): n equals a,t,g, or c
  SITE (4194): n equals a,t,g, or c
  SITE (4195): n equals a,t,g, or c
  SITE (4196): n equals a,t,g, or c
  SITE (4197): n equals a,t,g, or c
  SITE (4198): n equals a,t,g, or c
  SITE (4199): n equals a,t,g, or c
  SITE (4200): n equals a,t,g, or c
  SITE (4201): n equals a,t,g, or c
  SITE (4202): n equals a,t,g, or c
  SITE (4203): n equals a,t,g, or c
  SITE (4204): n equals a,t,g, or c
  SITE (4205): n equals a,t,g, or c
  SITE (4206): n equals a,t,g, or c
  SITE (4207): n equals a,t,g, or c
  SITE (4208): n equals a,t,g, or c
  SITE (4209): n equals a,t,g, or c
  SITE (4210): n equals a,t,g, or c
  SITE (4211): n equals a,t,g, or c
  SITE (4212): n equals a,t,g, or c
  SITE (4213): n equals a,t,g, or c
  SITE (4214): n equals a,t,g, or c
  SITE (4215): n equals a,t,g, or c
  SITE (4216): n equals a,t,g, or c
  SITE (4217): n equals a,t,g, or c
  SITE (4218): n equals a,t,g, or c
  SITE (4219): n equals a,t,g, or c
  SITE (4220): n equals a,t,g, or c
  SITE (4221): n equals a,t,g, or c
  SITE (4222): n equals a,t,g, or c
  SITE (4223): n equals a,t,g, or c
  SITE (4224): n equals a,t,g, or c
  SITE (4225): n equals a,t,g, or c
  SITE (4226): n equals a,t,g, or c
  SITE (4227): n equals a,t,g, or c
  SITE (4228): n equals a,t,g, or c
  SITE (4229): n equals a,t,g, or c
  SITE (4230): n equals a,t,g, or c
  SITE (4231): n equals a,t,g, or c
  SITE (4232): n equals a,t,g, or c
  SITE (4233): n equals a,t,g, or c
  SITE (4234): n equals a,t,g, or c
  SITE (4235): n equals a,t,g, or c
  SITE (4236): n equals a,t,g, or c
  SITE (4237): n equals a,t,g, or c
  SITE (4238): n equals a,t,g, or c
  SITE (4239): n equals a,t,g, or c
  SITE (4240): n equals a,t,g, or c
  SITE (4241): n equals a,t,g, or c
  SITE (4242): n equals a,t,g, or c
  SITE (4243): n equals a,t,g, or c
  SITE (4244): n equals a,t,g, or c
  SITE (4245): n equals a,t,g, or c
  SITE (4246): n equals a,t,g, or c
  SITE (4247): n equals a,t,g, or c
  SITE (4248): n equals a,t,g, or c
  SITE (4249): n equals a,t,g, or c
  SITE (4250): n equals a,t,g, or c
  SITE (4251): n equals a,t,g, or c
  SITE (4252): n equals a,t,g, or c
  SITE (4253): n equals a,t,g, or c
  SITE (4254): n equals a,t,g, or c
  SITE (4255): n equals a,t,g, or c
  SITE (4256): n equals a,t,g, or c
  SITE (4257): n equals a,t,g, or c
  SITE (4258): n equals a,t,g, or c
  SITE (4259): n equals a,t,g, or c
  SITE (4260): n equals a,t,g, or c
  SITE (4261): n equals a,t,g, or c
  SITE (4262): n equals a,t,g, or c
  SITE (4263): n equals a,t,g, or c
  SITE (4264): n equals a,t,g, or c
  SITE (4265): n equals a,t,g, or c
  SITE (4266): n equals a,t,g, or c
  SITE (4267): n equals a,t,g, or c
  SITE (4268): n equals a,t,g, or c
  SITE (4269): n equals a,t,g, or c
  SITE (4270): n equals a,t,g, or c
  SITE (4271): n equals a,t,g, or c
  SITE (4272): n equals a,t,g, or c
  SITE (4273): n equals a,t,g, or c
  SITE (4274): n equals a,t,g, or c
  SITE (4275): n equals a,t,g, or c
  SITE (4276): n equals a,t,g, or c
  SITE (4277): n equals a,t,g, or c
  SITE (4278): n equals a,t,g, or c
  SITE (4279): n equals a,t,g, or c
  SITE (4280): n equals a,t,g, or c
  SITE (4281): n equals a,t,g, or c
  SITE (4282): n equals a,t,g, or c
  SITE (4283): n equals a,t,g, or c
  SITE (4284): n equals a,t,g, or c
  SITE (4285): n equals a,t,g, or c
  SITE (4286): n equals a,t,g, or c
  SITE (4287): n equals a,t,g, or c
  SITE (4288): n equals a,t,g, or c
  SITE (4289): n equals a,t,g, or c
  SITE (4290): n equals a,t,g, or c
  SITE (4291): n equals a,t,g, or c
  SITE (4292): n equals a,t,g, or c
  SITE (4293): n equals a,t,g, or c
  SITE (4294): n equals a,t,g, or c
  SITE (4295): n equals a,t,g, or c
  SITE (4296): n equals a,t,g, or c
  SITE (4297): n equals a,t,g, or c
  SITE (4298): n equals a,t,g, or c
  SITE (4299): n equals a,t,g, or c
  SITE (4300): n equals a,t,g, or c
  SITE (4301): n equals a,t,g, or c
  SITE (4302): n equals a,t,g, or c
  SITE (4303): n equals a,t,g, or c
  SITE (4304): n equals a,t,g, or c
  SITE (4305): n equals a,t,g, or c
  SITE (4306): n equals a,t,g, or c
  SITE (4307): n equals a,t,g, or c
  SITE (4308): n equals a,t,g, or c
  SITE (4309): n equals a,t,g, or c
  SITE (4310): n equals a,t,g, or c
  SITE (4311): n equals a,t,g, or c
  SITE (4312): n equals a,t,g, or c
  SITE (4313): n equals a,t,g, or c
  SITE (4314): n equals a,t,g, or c
  SITE (4315): n equals a,t,g, or c
  SITE (4316): n equals a,t,g, or c
  SITE (4317): n equals a,t,g, or c
  SITE (4318): n equals a,t,g, or c
  SITE (4319): n equals a,t,g, or c
  SITE (4320): n equals a,t,g, or c
  SITE (4321): n equals a,t,g, or c
  SITE (4322): n equals a,t,g, or c
  SITE (4323): n equals a,t,g, or c
  SITE (4324): n equals a,t,g, or c
  SITE (4325): n equals a,t,g, or c
  SITE (4326): n equals a,t,g, or c
  SITE (4327): n equals a,t,g, or c
  SITE (4328): n equals a,t,g, or c
  SITE (4329): n equals a,t,g, or c
  SITE (4330): n equals a,t,g, or c
  SITE (4331): n equals a,t,g, or c
  SITE (4332): n equals a,t,g, or c
  SITE (4333): n equals a,t,g, or c
  SITE (4334): n equals a,t,g, or c
  SITE (4335): n equals a,t,g, or c
  SITE (4336): n equals a,t,g, or c
  SITE (4337): n equals a,t,g, or c
  SITE (4338): n equals a,t,g, or c
  SITE (4339): n equals a,t,g, or c
  SITE (4340): n equals a,t,g, or c
  SITE (4341): n equals a,t,g, or c
  SITE (4342): n equals a,t,g, or c
  SITE (4343): n equals a,t,g, or c
  SITE (4344): n equals a,t,g, or c
  SITE (4345): n equals a,t,g, or c
  SITE (4346): n equals a,t,g, or c
  SITE (4347): n equals a,t,g, or c
  SITE (4348): n equals a,t,g, or c
  SITE (4349): n equals a,t,g, or c
  SITE (4350): n equals a,t,g, or c
  SITE (4351): n equals a,t,g, or c
  SITE (4352): n equals a,t,g, or c
  SITE (4353): n equals a,t,g, or c
  SITE (4354): n equals a,t,g, or c
  SITE (4355): n equals a,t,g, or c
  SITE (4356): n equals a,t,g, or c
  SITE (4357): n equals a,t,g, or c
  SITE (4358): n equals a,t,g, or c
  SITE (4359): n equals a,t,g, or c
  SITE (4360): n equals a,t,g, or c
  SITE (4361): n equals a,t,g, or c
  SITE (4362): n equals a,t,g, or c
  SITE (4363): n equals a,t,g, or c
  SITE (4364): n equals a,t,g, or c
  SITE (4365): n equals a,t,g, or c
  SITE (4366): n equals a,t,g, or c
  SITE (4367): n equals a,t,g, or c
  SITE (4368): n equals a,t,g, or c
  SITE (4369): n equals a,t,g, or c
  SITE (4370): n equals a,t,g, or c
  SITE (4371): n equals a,t,g, or c
  SITE (4372): n equals a,t,g, or c
  SITE (4373): n equals a,t,g, or c
  SITE (4374): n equals a,t,g, or c
  SITE (4375): n equals a,t,g, or c
  SITE (4376): n equals a,t,g, or c
  SITE (4377): n equals a,t,g, or c
  SITE (4378): n equals a,t,g, or c
  SITE (4379): n equals a,t,g, or c
  SITE (4380): n equals a,t,g, or c
  SITE (4381): n equals a,t,g, or c
  SITE (4382): n equals a,t,g, or c
  SITE (4383): n equals a,t,g, or c
  SITE (4384): n equals a,t,g, or c
  SITE (4385): n equals a,t,g, or c
  SITE (4386): n equals a,t,g, or c
  SITE (4387): n equals a,t,g, or c
  SITE (4388): n equals a,t,g, or c
  SITE (4389): n equals a,t,g, or c
  SITE (4390): n equals a,t,g, or c
  SITE (4391): n equals a,t,g, or c
  SITE (4392): n equals a,t,g, or c
  SITE (4393): n equals a,t,g, or c
  SITE (4394): n equals a,t,g, or c
  SITE (4395): n equals a,t,g, or c
  SITE (4396): n equals a,t,g, or c
  SITE (4397): n equals a,t,g, or c
  SITE (4398): n equals a,t,g, or c
  SITE (4399): n equals a,t,g, or c
  SITE (4400): n equals a,t,g, or c
  SITE (4401): n equals a,t,g, or c
  SITE (4402): n equals a,t,g, or c
  SITE (4403): n equals a,t,g, or c
  SITE (4404): n equals a,t,g, or c
  SITE (4405): n equals a,t,g, or c
  SITE (4406): n equals a,t,g, or c
  SITE (4407): n equals a,t,g, or c
  SITE (4408): n equals a,t,g, or c
  SITE (4409): n equals a,t,g, or c
  SITE (4410): n equals a,t,g, or c
  SITE (4411): n equals a,t,g, or c
  SITE (4412): n equals a,t,g, or c
  SITE (4413): n equals a,t,g, or c
  SITE (4414): n equals a,t,g, or c
  SITE (4415): n equals a,t,g, or c
  SITE (4416): n equals a,t,g, or c
  SITE (4417): n equals a,t,g, or c
  SITE (4418): n equals a,t,g, or c
  SITE (4419): n equals a,t,g, or c
  SITE (4420): n equals a,t,g, or c
  SITE (4421): n equals a,t,g, or c
  SITE (4422): n equals a,t,g, or c
  SITE (4423): n equals a,t,g, or c
  SITE (4424): n equals a,t,g, or c
  SITE (4425): n equals a,t,g, or c
  SITE (4426): n equals a,t,g, or c
  SITE (4427): n equals a,t,g, or c
  SITE (4428): n equals a,t,g, or c
  SITE (4429): n equals a,t,g, or c
  SITE (4430): n equals a,t,g, or c
  SITE (4431): n equals a,t,g, or c
  SITE (4432): n equals a,t,g, or c
  SITE (4433): n equals a,t,g, or c
  SITE (4434): n equals a,t,g, or c
  SITE (4435): n equals a,t,g, or c
  SITE (4436): n equals a,t,g, or c
  SITE (4437): n equals a,t,g, or c
  SITE (4438): n equals a,t,g, or c
  SITE (4439): n equals a,t,g, or c
  SITE (4440): n equals a,t,g, or c
  SITE (4441): n equals a,t,g, or c
  SITE (4442): n equals a,t,g, or c
  SITE (4443): n equals a,t,g, or c
  SITE (4444): n equals a,t,g, or c
  SITE (4445): n equals a,t,g, or c
  SITE (4446): n equals a,t,g, or c
  SITE (4447): n equals a,t,g, or c
  SITE (4448): n equals a,t,g, or c
  SITE (4449): n equals a,t,g, or c
  SITE (4450): n equals a,t,g, or c
  SITE (4451): n equals a,t,g, or c
  SITE (4452): n equals a,t,g, or c
  SITE (4453): n equals a,t,g, or c
  SITE (4454): n equals a,t,g, or c
  SITE (4455): n equals a,t,g, or c
  SITE (4456): n equals a,t,g, or c
  SITE (4457): n equals a,t,g, or c
  SITE (4458): n equals a,t,g, or c
  SITE (4459): n equals a,t,g, or c
  SITE (4460): n equals a,t,g, or c
  SITE (4461): n equals a,t,g, or c
  SITE (4462): n equals a,t,g, or c
  SITE (4463): n equals a,t,g, or c
  SITE (4464): n equals a,t,g, or c
  SITE (4465): n equals a,t,g, or c
  SITE (4466): n equals a,t,g, or c
  SITE (4467): n equals a,t,g, or c
  SITE (4468): n equals a,t,g, or c
  SITE (4469): n equals a,t,g, or c
  SITE (4470): n equals a,t,g, or c
  SITE (4471): n equals a,t,g, or c
  SITE (4472): n equals a,t,g, or c
  SITE (4473): n equals a,t,g, or c
  SITE (4474): n equals a,t,g, or c
  SITE (4475): n equals a,t,g, or c
  SITE (4476): n equals a,t,g, or c
  SITE (4477): n equals a,t,g, or c
  SITE (4478): n equals a,t,g, or c
  SITE (4479): n equals a,t,g, or c
  SITE (4480): n equals a,t,g, or c
  SITE (4481): n equals a,t,g, or c
  SITE (4482): n equals a,t,g, or c
  SITE (4483): n equals a,t,g, or c
  SITE (4484): n equals a,t,g, or c
  SITE (4485): n equals a,t,g, or c
  SITE (4486): n equals a,t,g, or c
  SITE (4487): n equals a,t,g, or c
  SITE (4488): n equals a,t,g, or c
  SITE (4489): n equals a,t,g, or c
  SITE (4490): n equals a,t,g, or c
  SITE (4491): n equals a,t,g, or c
  SITE (4492): n equals a,t,g, or c
  SITE (4493): n equals a,t,g, or c
  SITE (4494): n equals a,t,g, or c
  SITE (4495): n equals a,t,g, or c
  SITE (4496): n equals a,t,g, or c
  SITE (4497): n equals a,t,g, or c
  SITE (4498): n equals a,t,g, or c
  SITE (4499): n equals a,t,g, or c
  SITE (4500): n equals a,t,g, or c
  SITE (4501): n equals a,t,g, or c
  SITE (4502): n equals a,t,g, or c
  SITE (4503): n equals a,t,g, or c
  SITE (4504): n equals a,t,g, or c
  SITE (4505): n equals a,t,g, or c
  SITE (4506): n equals a,t,g, or c
  SITE (4507): n equals a,t,g, or c
  SITE (4508): n equals a,t,g, or c
  SITE (4509): n equals a,t,g, or c
  SITE (4510): n equals a,t,g, or c
  SITE (4511): n equals a,t,g, or c
  SITE (4512): n equals a,t,g, or c
  SITE (4513): n equals a,t,g, or c
  SITE (4514): n equals a,t,g, or c
  SITE (4515): n equals a,t,g, or c
  SITE (4516): n equals a,t,g, or c
  SITE (4517): n equals a,t,g, or c
  SITE (4518): n equals a,t,g, or c
  SITE (4519): n equals a,t,g, or c
  SITE (4520): n equals a,t,g, or c
  SITE (4521): n equals a,t,g, or c
  SITE (4522): n equals a,t,g, or c
  SITE (4523): n equals a,t,g, or c
  SITE (4524): n equals a,t,g, or c
  SITE (4525): n equals a,t,g, or c
  SITE (4526): n equals a,t,g, or c
  SITE (4527): n equals a,t,g, or c
  SITE (4528): n equals a,t,g, or c
  SITE (4529): n equals a,t,g, or c
  SITE (4530): n equals a,t,g, or c
  SITE (4531): n equals a,t,g, or c
  SITE (4532): n equals a,t,g, or c
  SITE (4533): n equals a,t,g, or c
  SITE (4534): n equals a,t,g, or c
  SITE (4535): n equals a,t,g, or c
  SITE (4536): n equals a,t,g, or c
  SITE (4537): n equals a,t,g, or c
  SITE (4538): n equals a,t,g, or c
  SITE (4539): n equals a,t,g, or c
  SITE (4540): n equals a,t,g, or c
  SITE (4541): n equals a,t,g, or c
  SITE (4542): n equals a,t,g, or c
  SITE (4543): n equals a,t,g, or c
  SITE (4544): n equals a,t,g, or c
  SITE (4545): n equals a,t,g, or c
  SITE (4546): n equals a,t,g, or c
  SITE (4547): n equals a,t,g, or c
  SITE (4548): n equals a,t,g, or c
  SITE (4549): n equals a,t,g, or c
  SITE (4550): n equals a,t,g, or c
  SITE (4551): n equals a,t,g, or c
  SITE (4552): n equals a,t,g, or c
  SITE (4553): n equals a,t,g, or c
  SITE (4554): n equals a,t,g, or c
  SITE (4555): n equals a,t,g, or c
  SITE (4556): n equals a,t,g, or c
  SITE (4557): n equals a,t,g, or c
  SITE (4558): n equals a,t,g, or c
  SITE (4559): n equals a,t,g, or c
  SITE (4560): n equals a,t,g, or c
  SITE (4561): n equals a,t,g, or c
  SITE (4562): n equals a,t,g, or c
  SITE (4563): n equals a,t,g, or c
  SITE (4564): n equals a,t,g, or c
  SITE (4565): n equals a,t,g, or c
  SITE (4566): n equals a,t,g, or c
  SITE (4567): n equals a,t,g, or c
  SITE (4568): n equals a,t,g, or c
  SITE (4569): n equals a,t,g, or c
  SITE (4570): n equals a,t,g, or c
  SITE (4571): n equals a,t,g, or c
  SITE (4572): n equals a,t,g, or c
  SITE (4573): n equals a,t,g, or c
  SITE (4574): n equals a,t,g, or c
  SITE (4575): n equals a,t,g, or c
  SITE (4576): n equals a,t,g, or c
  SITE (4577): n equals a,t,g, or c
  SITE (4578): n equals a,t,g, or c
  SITE (4579): n equals a,t,g, or c
  SITE (4580): n equals a,t,g, or c
  SITE (4581): n equals a,t,g, or c
  SITE (4582): n equals a,t,g, or c
  SITE (4583): n equals a,t,g, or c
  SITE (4584): n equals a,t,g, or c
  SITE (4585): n equals a,t,g, or c
  SITE (4586): n equals a,t,g, or c
  SITE (4587): n equals a,t,g, or c
  SITE (4588): n equals a,t,g, or c
  SITE (4589): n equals a,t,g, or c
  SITE (4590): n equals a,t,g, or c
  SITE (4591): n equals a,t,g, or c
  SITE (4592): n equals a,t,g, or c
  SITE (4593): n equals a,t,g, or c
  SITE (4594): n equals a,t,g, or c
  SITE (4595): n equals a,t,g, or c
  SITE (4596): n equals a,t,g, or c
  SITE (4597): n equals a,t,g, or c
  SITE (4598): n equals a,t,g, or c
  SITE (4599): n equals a,t,g, or c
  SITE (4600): n equals a,t,g, or c
  SITE (4601): n equals a,t,g, or c
  SITE (4602): n equals a,t,g, or c
  SITE (4603): n equals a,t,g, or c
  SITE (4604): n equals a,t,g, or c
  SITE (4605): n equals a,t,g, or c
  SITE (4606): n equals a,t,g, or c
  SITE (4607): n equals a,t,g, or c
  SITE (4608): n equals a,t,g, or c
  SITE (4609): n equals a,t,g, or c
  SITE (4610): n equals a,t,g, or c
  SITE (4611): n equals a,t,g, or c
  SITE (4612): n equals a,t,g, or c
  SITE (4613): n equals a,t,g, or c
  SITE (4614): n equals a,t,g, or c
  SITE (4615): n equals a,t,g, or c
  SITE (4616): n equals a,t,g, or c
  SITE (4617): n equals a,t,g, or c
  SITE (4618): n equals a,t,g, or c
  SITE (4619): n equals a,t,g, or c
  SITE (4620): n equals a,t,g, or c
  SITE (4621): n equals a,t,g, or c
  SITE (4622): n equals a,t,g, or c
  SITE (4623): n equals a,t,g, or c
  SITE (4624): n equals a,t,g, or c
  SITE (4625): n equals a,t,g, or c
  SITE (4626): n equals a,t,g, or c
  SITE (4627): n equals a,t,g, or c
  SITE (4628): n equals a,t,g, or c
  SITE (4629): n equals a,t,g, or c
  SITE (4630): n equals a,t,g, or c
  SITE (4631): n equals a,t,g, or c
  SITE (4632): n equals a,t,g, or c
  SITE (4633): n equals a,t,g, or c
  SITE (4634): n equals a,t,g, or c
  SITE (4635): n equals a,t,g, or c
  SITE (4636): n equals a,t,g, or c
  SITE (4637): n equals a,t,g, or c
  SITE (4638): n equals a,t,g, or c
  SITE (4639): n equals a,t,g, or c
  SITE (4640): n equals a,t,g, or c
  SITE (4641): n equals a,t,g, or c
  SITE (4642): n equals a,t,g, or c
  SITE (4643): n equals a,t,g, or c
  SITE (4644): n equals a,t,g, or c
  SITE (4645): n equals a,t,g, or c
  SITE (4646): n equals a,t,g, or c
  SITE (4647): n equals a,t,g, or c
  SITE (4648): n equals a,t,g, or c
  SITE (4649): n equals a,t,g, or c
  SITE (4650): n equals a,t,g, or c
  SITE (4651): n equals a,t,g, or c
  SITE (4652): n equals a,t,g, or c
  SITE (4653): n equals a,t,g, or c
  SITE (4654): n equals a,t,g, or c
  SITE (4655): n equals a,t,g, or c
  SITE (4656): n equals a,t,g, or c
  SITE (4657): n equals a,t,g, or c
  SITE (4658): n equals a,t,g, or c
  SITE (4659): n equals a,t,g, or c
  SITE (4660): n equals a,t,g, or c
  SITE (4661): n equals a,t,g, or c
  SITE (4662): n equals a,t,g, or c
  SITE (4663): n equals a,t,g, or c
  SITE (4664): n equals a,t,g, or c
  SITE (4665): n equals a,t,g, or c
  SITE (4666): n equals a,t,g, or c
  SITE (4667): n equals a,t,g, or c
  SITE (4668): n equals a,t,g, or c
  SITE (4669): n equals a,t,g, or c
  SITE (4670): n equals a,t,g, or c
  SITE (4671): n equals a,t,g, or c
  SITE (4672): n equals a,t,g, or c
  SITE (4673): n equals a,t,g, or c
  SITE (4674): n equals a,t,g, or c
  SITE (4675): n equals a,t,g, or c
  SITE (4676): n equals a,t,g, or c
  SITE (4677): n equals a,t,g, or c
  SITE (4678): n equals a,t,g, or c
  SITE (4679): n equals a,t,g, or c
  SITE (4680): n equals a,t,g, or c
  SITE (4681): n equals a,t,g, or c
  SITE (4682): n equals a,t,g, or c
  SITE (4683): n equals a,t,g, or c
  SITE (4684): n equals a,t,g, or c
  SITE (4685): n equals a,t,g, or c
  SITE (4686): n equals a,t,g, or c
  SITE (4687): n equals a,t,g, or c
  SITE (4688): n equals a,t,g, or c
  SITE (4689): n equals a,t,g, or c
  SITE (4690): n equals a,t,g, or c
  SITE (4691): n equals a,t,g, or c
  SITE (4692): n equals a,t,g, or c
  SITE (4693): n equals a,t,g, or c
  SITE (4694): n equals a,t,g, or c
  SITE (4695): n equals a,t,g, or c
  SITE (4696): n equals a,t,g, or c
  SITE (4697): n equals a,t,g, or c
  SITE (4698): n equals a,t,g, or c
  SITE (4699): n equals a,t,g, or c
  SITE (4700): n equals a,t,g, or c
  SITE (4701): n equals a,t,g, or c
  SITE (4702): n equals a,t,g, or c
  SITE (4703): n equals a,t,g, or c
  SITE (4704): n equals a,t,g, or c
  SITE (4705): n equals a,t,g, or c
  SITE (4706): n equals a,t,g, or c
  SITE (4707): n equals a,t,g, or c
  SITE (4708): n equals a,t,g, or c
  SITE (4709): n equals a,t,g, or c
  SITE (4710): n equals a,t,g, or c
  SITE (4711): n equals a,t,g, or c
  SITE (4712): n equals a,t,g, or c
  SITE (4713): n equals a,t,g, or c
  SITE (4714): n equals a,t,g, or c
  SITE (4715): n equals a,t,g, or c
  SITE (4716): n equals a,t,g, or c
  SITE (4717): n equals a,t,g, or c
  SITE (4718): n equals a,t,g, or c
  SITE (4719): n equals a,t,g, or c
  SITE (4720): n equals a,t,g, or c
  SITE (4721): n equals a,t,g, or c
  SITE (4722): n equals a,t,g, or c
  SITE (4723): n equals a,t,g, or c
  SITE (4724): n equals a,t,g, or c
  SITE (4725): n equals a,t,g, or c
  SITE (4726): n equals a,t,g, or c
  SITE (4727): n equals a,t,g, or c
  SITE (4728): n equals a,t,g, or c
  SITE (4729): n equals a,t,g, or c
  SITE (4730): n equals a,t,g, or c
  SITE (4731): n equals a,t,g, or c
  SITE (4732): n equals a,t,g, or c
  SITE (4733): n equals a,t,g, or c
  SITE (4734): n equals a,t,g, or c
  SITE (4735): n equals a,t,g, or c
  SITE (4736): n equals a,t,g, or c
  SITE (4737): n equals a,t,g, or c
  SITE (4738): n equals a,t,g, or c
  SITE (4739): n equals a,t,g, or c
  SITE (4740): n equals a,t,g, or c
  SITE (4741): n equals a,t,g, or c
  SITE (4742): n equals a,t,g, or c
  SITE (4743): n equals a,t,g, or c
  SITE (4744): n equals a,t,g, or c
  SITE (4745): n equals a,t,g, or c
  SITE (4746): n equals a,t,g, or c
  SITE (4747): n equals a,t,g, or c
  SITE (4748): n equals a,t,g, or c
  SITE (4749): n equals a,t,g, or c
  SITE (4750): n equals a,t,g, or c
  SITE (4751): n equals a,t,g, or c
  SITE (4752): n equals a,t,g, or c
  SITE (4753): n equals a,t,g, or c
  SITE (4754): n equals a,t,g, or c
  SITE (4755): n equals a,t,g, or c
  SITE (4756): n equals a,t,g, or c
  SITE (4757): n equals a,t,g, or c
  SITE (4758): n equals a,t,g, or c
  SITE (4759): n equals a,t,g, or c
  SITE (4760): n equals a,t,g, or c
  SITE (4761): n equals a,t,g, or c
  SITE (4762): n equals a,t,g, or c
  SITE (4763): n equals a,t,g, or c
  SITE (4764): n equals a,t,g, or c
  SITE (4765): n equals a,t,g, or c
  SITE (4766): n equals a,t,g, or c
  SITE (4767): n equals a,t,g, or c
  SITE (4768): n equals a,t,g, or c
  SITE (4769): n equals a,t,g, or c
  SITE (4770): n equals a,t,g, or c
  SITE (4771): n equals a,t,g, or c
  SITE (4772): n equals a,t,g, or c
  SITE (4773): n equals a,t,g, or c
  SITE (4774): n equals a,t,g, or c
  SITE (4775): n equals a,t,g, or c
  SITE (4776): n equals a,t,g, or c
  SITE (4777): n equals a,t,g, or c
  SITE (4778): n equals a,t,g, or c
  SITE (4779): n equals a,t,g, or c
  SITE (4780): n equals a,t,g, or c
  SITE (4781): n equals a,t,g, or c
  SITE (4782): n equals a,t,g, or c
  SITE (4783): n equals a,t,g, or c
  SITE (4784): n equals a,t,g, or c
  SITE (4785): n equals a,t,g, or c
  SITE (4786): n equals a,t,g, or c
  SITE (4787): n equals a,t,g, or c
  SITE (4788): n equals a,t,g, or c
  SITE (4789): n equals a,t,g, or c
  SITE (4790): n equals a,t,g, or c
  SITE (4791): n equals a,t,g, or c
  SITE (4792): n equals a,t,g, or c
  SITE (4793): n equals a,t,g, or c
  SITE (4794): n equals a,t,g, or c
  SITE (4795): n equals a,t,g, or c
  SITE (4796): n equals a,t,g, or c
  SITE (4797): n equals a,t,g, or c
  SITE (4798): n equals a,t,g, or c
  SITE (4799): n equals a,t,g, or c
  SITE (4800): n equals a,t,g, or c
  SITE (4801): n equals a,t,g, or c
  SITE (4802): n equals a,t,g, or c
  SITE (4803): n equals a,t,g, or c
  SITE (4804): n equals a,t,g, or c
  SITE (4805): n equals a,t,g, or c
  SITE (4806): n equals a,t,g, or c
  SITE (4807): n equals a,t,g, or c
  SITE (4808): n equals a,t,g, or c
  SITE (4809): n equals a,t,g, or c
  SITE (4810): n equals a,t,g, or c
  SITE (4811): n equals a,t,g, or c
  SITE (4812): n equals a,t,g, or c
  SITE (4813): n equals a,t,g, or c
  SITE (4814): n equals a,t,g, or c
  SITE (4815): n equals a,t,g, or c
  SITE (4816): n equals a,t,g, or c
  SITE (4817): n equals a,t,g, or c
  SITE (4818): n equals a,t,g, or c
  SITE (4819): n equals a,t,g, or c
  SITE (4820): n equals a,t,g, or c
  SITE (4821): n equals a,t,g, or c
  SITE (4822): n equals a,t,g, or c
  SITE (4823): n equals a,t,g, or c
  SITE (4824): n equals a,t,g, or c
  SITE (4825): n equals a,t,g, or c
  SITE (4826): n equals a,t,g, or c
  SITE (4827): n equals a,t,g, or c
  SITE (4828): n equals a,t,g, or c
  SITE (4829): n equals a,t,g, or c
  SITE (4830): n equals a,t,g, or c
  SITE (4831): n equals a,t,g, or c
  SITE (4832): n equals a,t,g, or c
  SITE (4833): n equals a,t,g, or c
  SITE (4834): n equals a,t,g, or c
  SITE (4835): n equals a,t,g, or c
  SITE (4836): n equals a,t,g, or c
  SITE (4837): n equals a,t,g, or c
  SITE (4838): n equals a,t,g, or c
  SITE (4839): n equals a,t,g, or c
  SITE (4840): n equals a,t,g, or c
  SITE (4841): n equals a,t,g, or c
  SITE (4842): n equals a,t,g, or c
  SITE (4843): n equals a,t,g, or c
  SITE (4844): n equals a,t,g, or c
  SITE (4845): n equals a,t,g, or c
  SITE (4846): n equals a,t,g, or c
  SITE (4847): n equals a,t,g, or c
  SITE (4848): n equals a,t,g, or c
  SITE (4849): n equals a,t,g, or c
  SITE (4850): n equals a,t,g, or c
  SITE (4851): n equals a,t,g, or c
  SITE (4852): n equals a,t,g, or c
  SITE (4853): n equals a,t,g, or c
  SITE (4854): n equals a,t,g, or c
  SITE (4855): n equals a,t,g, or c
  SITE (4856): n equals a,t,g, or c
  SITE (4857): n equals a,t,g, or c
  SITE (4858): n equals a,t,g, or c
  SITE (4859): n equals a,t,g, or c
  SITE (4860): n equals a,t,g, or c
  SITE (4861): n equals a,t,g, or c
  SITE (4862): n equals a,t,g, or c
  SITE (4863): n equals a,t,g, or c
  SITE (4864): n equals a,t,g, or c
  SITE (4865): n equals a,t,g, or c
  SITE (4866): n equals a,t,g, or c
  SITE (4867): n equals a,t,g, or c
  SITE (4868): n equals a,t,g, or c
  SITE (4869): n equals a,t,g, or c
  SITE (4870): n equals a,t,g, or c
  SITE (4871): n equals a,t,g, or c
  SITE (4872): n equals a,t,g, or c
  SITE (4873): n equals a,t,g, or c
  SITE (4874): n equals a,t,g, or c
  SITE (4875): n equals a,t,g, or c
  SITE (4876): n equals a,t,g, or c
  SITE (4877): n equals a,t,g, or c
  SITE (4878): n equals a,t,g, or c
  SITE (4879): n equals a,t,g, or c
  SITE (4880): n equals a,t,g, or c
  SITE (4881): n equals a,t,g, or c
  SITE (4882): n equals a,t,g, or c
  SITE (4883): n equals a,t,g, or c
  SITE (4884): n equals a,t,g, or c
  SITE (4885): n equals a,t,g, or c
  SITE (4886): n equals a,t,g, or c
  SITE (4887): n equals a,t,g, or c
  SITE (4888): n equals a,t,g, or c
  SITE (4889): n equals a,t,g, or c
  SITE (4890): n equals a,t,g, or c
  SITE (4891): n equals a,t,g, or c
  SITE (4892): n equals a,t,g, or c

SEQ ID NO: 12797 - DNA, 465 bp, Homo sapiens
ctacgttggaattacaagtaggacaacaaagatgactattaaagaaagcctcctgagtgctggaagcacagcaggcgtgggtctgtccactcactgtaatgtgatttgcacaggaaaacatcacatagggcacatcaactcaggaaagatagtcgttgaaaagctacctcagctgggcgtagtggtcacgcctgtaatcccagaactttgtaaggctgtgaggcttgtggatcccttgagaccaagagtacgagaccaacctgagcaaaacagggagaccccgcctatgcaaaaaatacaaaaattagccaggcgtggtggtgcactcctgttgactcagctattcaggaagctgaggcagaaggaccacaagaagtcaaggccgcagtggggtataatcacatcactgcactccaccatgggtgacagaggtgagaccctgttgcaaaaaaaaaaaaaaaaaaa

SEQ ID NO: 12798 - DNA, 228 bp, Homo sapiens; identical to SEQ ID NO: 7553

SEQ ID NO: 12799 - DNA, 5012 bp, Homo sapiens
tgtaatcccagctgctcaggaggctgaggcgggagaatcacttgaacctgggaggcggaggttgcagcgagccgagatcatgccactgcactccagcctgggtgacagagcgagagaccctgtatcaaaacaaacaaagaaacagcaacaacaacaaaaattagcctcgggtggtagcatgcatctgtgattctcagctacttgggaggctgaggttgaaggattgcttgagcccaggagatcagggctgcagtgagctatgattataccactgcactccagcctgcatgacagaccaagaccttgtctcaaaaataagataaaaataagaatattttcaaatgtttgccaatctgatgggtgaaaaaatgcaaattcattgttttcactagagtttccctgaatagtggtgaggctgcgtatctttggtatttggaaatgtctacgatatttgtccacttttcaaaaggctcatttgttttgtttgtttgtaagttagattttttcctaattgtatgcatattctttttttgttatatttattgcaaatattttctcctactccattggtctttttgctttatgtaggtacatctggaagttgttttcttcatagctcccaaggtatgaaaatattctcctacagttttgctgttgttttttttttcctttggagaaaaccatttttattatcatcaccacccagcttatttgtgctggattatgtaccagtggcaagatcttctaacgaacatctgcataacatttattttatgttttaaaagatgaaaataactgtacaaggttaagtacaaaagtacacaagataacagacacaaaaaaatgcatgtatgagatttcattctacctacagcactttatgttcaaaaagtagaattcacgaaccaaaaaatattgtccttctatagtcctgtcaggtttagtgaaagcgagtctaacatgattacaacacctatatcactgatctgatatttatgaaaaaaatcttatttttcaataaattaaagccaatgcaaatgggaatagcatttcagttttttggtgtttttcttttttttaattttttttattttgagacagagtctcactctgttgcccagactggagtacagtggcatgatcttggttcaccgtgacctccacctctcaggttcaagcaattcttgtgcctcagccacctgagtagctgggggttttcaccatgttgctcaggctggtcttaaactcctggcctcaagtgatccacctgcctcgccctcccaaagtgctgggattacaggcatgagccaccgcgcccggccatgtttcaggtttataaaatagagatatgaacatggatggtggtgatggttgcacattatgaacgttatcgaatgctactgaattgtacacttaaaaaatggctatgatggtaaattttatgttacgtgtattttaccacagcttaaaaaaagagagaggaagaaaagccagtgcaacaccctacaaactggaacactagctctttgggaacaaggacctgacatcagaacaagaaggctataagttcccaaaccttaaaagtatgatctttttcaaactgcatccatttctcacgttgaagatgtgaaacccaatcccgttcctctttatgtgtgggtctgtgatcttgccttttcatactgagcatctaaatttctaaatacagtacttcctattgcttcaaagtcttctaactttcttcatcaagtgagctacatctagcttcatcttcactcttaatacccactaatttccatatatatgacattttggtccttgtttcccaaagtcatagttcagcagacggggagtttgcccagtttttcttgccttgacttttttcctcttgttcagcaaatttcactggatttccagctgctgtgtcataatccctaggtacagctgttctgtctctgccaaagctgttgcttgcagggctcccatttgagctgccatagctatctgagttactggcattcctgatgccaacagggcagcaacattgagaacaaaatctctagtaactggagctatttcttgtttttgtttttcaatgatttctttttcttttaaaaaattttttcccaacacccatcccaactatttctttttcttgctgttcttgtaatttctttgcctagtccatcctcccagctaaagcttcttatgcatcctttgctgtgcctctgcctctgaagagagatgaactggaaatctggcttaaacttctgctaaatcttagtttctcaatgctcttctttctctcttgtcttctgcttcctgtactacttctgcttctttcctatgcatgtcatatttatttatttacttatttttcacacgcaacacagatgtagtttttatcttgaacaggagcaagatctgatccatggttttctttctttcttttttttttctttcctttttggagacggcgtctcactctgttggccaggctggagtgcagtggtgtgacctcagctcactgaaacctccacctcctgggttcaagtgattctcctgcctcagcctcccaagtagctgggacctcagacatgcatcaccacgcctggctaatttttgcatttttagtagagacagggttttgccatgttggccaggttggtctcaaactcctgaatctcaggtgatctgcctgacttggcctcccaaagtgctgggattacaggtgtgaagcaccatgtccagcccatggttttcttttcctgcttctagatcatgatcgttcttctctctgcttctggattgagactacttcttttccctctactacgatgatgcctttcacgagacctgtatcttgagtgacttctgcttcttgatggctttctttgtgtttgtgtctgtcctcatcattttcagatgaatgtatttatttattgagacagcatgtcactctgttgcccaggctggagtgcagtggcacaatcacagctcactgtaacctctgtctccccggctcaagcttctcaccacagcctcccgagtagctggaatcacaggcacacaccaccacgcctggctaacttttgtgttttttatagagacagggctttgccatgttgctcaagctggtctcaaacttgtgagcccaagcaatttgcccaccttggccttccgaagtactgagactacagacgtgagtcactgcgcccagcccattttcagatgaatttagtccctctcttcctttatcagaataatgttctttgtcattatgctcctcagaagtgtatttcttagaggatttgttgtaggattcctgtcttcttgcctcatcatgaaataggcttattattttcctacctgagtctgcaatgtcttcagttcagcctctttgcccatcagcatgcgctttgtgttttcgtccttcgttttctttcttgttttctttctcttgaccttgattgtgatcttgaataatattttgagtaagaaaaacagatgcatctgacagttctttttccacccactatctggggatgtctttttctggggctagtccatcttgtcctggataactaccctatcttgagaacccagtcttagtttcatgaaacatctttaatgaaaacagccttttgggatggtgctgctgcaaactgtggtctggctctcctcgcatgtgctctggctgccgcagaacagagctcaggccgctagggggcacctccacgtgccgcttttagcagtaccagccacctcaaagctttgccacagactgaatagctccttccgggggcctggatggcacccaggggatctgccgttgcttttttaatttatttttttacatttagctcattaatatctgttagatatttttatgtctgcattgaaatatgtaactttatttttcccccaaaggataactgttccaacattatcagttagcttgtcttttccccaccaacttaaaatacgactcttatttttaaaattgcattttataaacatgtatgtttcagtaatttatattctgccccactgatctatattcccatcttagaattatacttttattttatttttaaaatttatttagagacaaggtcttggtatgtcactcaggctggaatgcagtggtgcaatgataattcactgcaaccttgaattcctgggctcaagcaatcctcccacctcagccttccaagtagctgggactacaggtgtgtgccactatgcctggctaatttttttatttttatttttttgtggagacgatgttttgctatgttgcccaggctggtctcaaactcctgggctcgagggatcttcctgtcttggctgcccaaagtgttgggattataggcatgagccacctcacccagccttagtattatactattttagttaacaaagctttacaatgaattttgatacctagaaagactgcacccaggtgaaataaacagccttgtttctcacacaaagcctgtttggtggtctcttcacatggacacgtgagacagatttcgctagggaagcaaataaccatggaggtgggcaagaaatatccatgattgtagagctttcaatcagccttttattcttgtaacaaatgaaaaacaaaggattatcagacatctgcggaaaacctctaacatagaagaaggagataaaatgaacaaacaataaaaagcaacttaaaaatggacaccatataaagaaaggaaaacagtttaaaaaaaaaaaaaacccaaaaccctattcttaagctacagagaaagcctggccaacatggtgaaaccctatctctactaaaaatacgaagtattttagccaggcatggtggcacatacctgtagtcccagctgctcaggaggctgaggcaggagaatcacctgcacccgggaggctgaggctgcagtgttctgagatcacaccacagcactccagcctgggtgacagagtgagaccttgtctcaaaaaaaaaaaaaaaaaaaaaa

SEQ ID NO: 12800 - DNA, 5012 bp, Homo sapiens; identical to SEQ ID NO: 12799

SEQ ID NO: 12801 - DNA, 2032 bp, Homo sapiens
gaaagaaagaaagaaagaaatcatagacaacgggaataaaaactgcaagatacctaggaatgaatccaacaaatgcactttcttcacagatcaaagcataaactctaattgaagactataaaaggcacatgcagtgttcatggcaccatagccatggatgaaaagactcatcattgtggagattggcagttctcaaattaatctggatttattaatacacttttgattatattcccaggagagatttttataaaatgcagaccagccaaggcaatattgaagaggcgcagacggcattaagaagctgcaattgcagggcagccaggccaagaggcaccagggccctcagcgcagcagtgagcccagaagggccgcaagtggcagggtacctctgcgcactagggaaggagccatgttgctaaatggtgttgggacagctgatgccatatagaaaaggatgcagtgatacccctacctcacaccatgcacaaaacacatcacagtgagagacctaacctgtaaaagcctttcagagaaaaatcaagaggaaatcttcctaacagtgaggaacaaaaagacagattgaacaagagattgagggtaaagacatcaataggtttgactctacagacttcttcatgaccacaagaaaaatgtcacggttgtaatgtaagtggcagaataagaaaagatatttgcagtatctacgagttacagaatatatataaaaatatgtgcaactgtctgtcgtgaaaaaaaacggcaaacaccacacatcgataaggatttggggacattggcttgtgtgtgtactgccgagagtgtagatggtcacccatttggggaatgaaatggccttccctggggagatcagagtcatgcaggatacatgactggcagttccgttctaggcgcttccttctccacccgcaaggacacgtgaagttgttgactgtgacatggttcacaaagccaggggcagctcaaatgacggggttagttgtacagtggaaggtaacgcaagattaaatgagttaaccagagctgtgtgtcttgggccagataaatcctcaaagcctaacattaaagaagcaagttgctagaaaataggccccattttgacactgaagaggttttttgaaatgtggaaggcatgttacgttgttgatgagcgtgcgtaagcaggaaaacctcagcagcccctgggaggcgccctcagcccaagggacagccctcccaggcaggtgcaggggcagacgatgcttttactgtgtctaaaattatgcttctctatgaaaaaaaaaaaagagcaaacaatggtaaaatgttagcaaagttagagctgagtggtgggtacaaggattactatggtgttcctttctgtatcttaaaatggttatcattacagttttagaactgaatctggttttaaatacaggccgtcacgtgaggtgggggttgctctgctctgtctaatccccacacaaagggcagcccttgccccattctctccgtccatcccttgctgacgccagccgtcgggagtcagccccttgctgtctgaaggctgccggcccgtggcccatgccgagctcctgtttgtctcagaagaactggcttcctcaagctttgatagggccaaaaggaggaccctcatcttcaagccctaacagccttcctaaagtcacccagacctgccagttctgcccaggcgtccagacggcaggcatcttagacgtcgctgcaagggtctgctccagatggtgagcaccttagacagacgttgctggaaggcactgctctgaacggtgggcacctaacagacgttccgggaaggcactgctccggatgttgggcatcttagatgttcctggaaggcactgctctggacagtggacaccttagacagatgttcctggaaggctctgctccgatgttcctggaaggctctgctccgaacagtgggcaccttagacagacgttcctggaaggctctgctccgaacagtggacaccttagacagatgttcctg

SEQ ID NO: 12802 - DNA, 144 bp, Homo sapiens
ggtggcaggtgcctgtaatcccagttactcaggaggctgaggcaggagaatcacttgaacctgggaggcggaggttgcagtgagccaagatcacaccactgcactccagcctgggcaaaagtgtgagactacatctcaaaaaaa

SEQ ID NO: 12803 - DNA, 187 bp, Homo sapiens
ttgtttctttttttttttttttttttttttttgagacagagtcttgccttgtcgcccaggctggagtgcagtggcgcgatctcggctcactgcaagctccgcctcctgggttcatgccattcttctgcctcagcctcccgagtagctgggactacaagcgcccaccaccacgcccagctaatttttt

SEQ ID NO: 12804 - DNA, 3834 bp, Homo sapiens
cgccctcccccaaaaaaaagaaaagaaaatcgaaagtctgtactatagttttggtccagctccctaaaattttgtttagctgcaaataattaagtgggataatgcatgagaaggcatttgtaaactgcaaagtgctagaaatgctgtgaggtaacttctttcacccctctcctcactattctctgtctacagtggtatttcccaaggcattctccttgaaaccttagtctctcattatgccttcacaagaggaggagaggaggcattgctagaaaatgctgcatgcccctactggagatcggagagtcacaacatgctttagcattttaaagtctatgaaacaggccagacggatgtggtggctcacgcctgtaatcccagcactttggaaggctaaggcgggtggatcacctgaggttaggagtttgagaccagcctgaccaacgtggcaaaacatcgtctctactaaaaaatattaaaaaattagctggacgtggtggcttatgcctgtaatcccagctactcaagaggctgaggcaccagaatcgcttgaacccaggaggcggaggttgcagtaagccaaggttgggccactgtactccaacctgggcaacagagtgagactctgtctcaaaaataaaaaataaaaataaaggctatgggccgggcgtggtggctcacgcctgtaatcccagcactttgggaggctgaggtgggtggatcacaaggtcaggagatcgagaccatcctggctaacacggtgaaaccccgtctctactaaaaatataaaaaattagctgggcacggtggcgggcgcctatagtcccagctacttgggaggctgaggcaggagaatggcatgaacctgggaggcggagcttgcagtgaaccaagatcgtgccactgcactccagcctgggcgacagagcgagactctgtctcaaaaaaaaaaaaaaaaaaaggctatgaaacaatggtgaagacacctgttggatctaatttaacttagggtgtacaaactgattttattaaaatttcaaaaaaattgaattttaagcttttaacaggggaggcaaatcttgttatctgatgagaaatgtgtttggggaagagctggtctgtctccactgctgcctcctctctctcaccttcttcccctactgccctactgaaacttctctcaaaaggcattagtgaggggcctccgaattgccaaatcccaagccctcttagtctttagcatatttgacaccattggcacatttcattctaaaaatctctcccctctagcttctgtgatatactctgggtattttctctctctggctttccttagtcctttttattcttgctctgtaaattccatgacttttttttttttttttttttgagacggagtcttgctctgtcgcccaggctggagtgcagtggtgcaatctcggctcactgcaagctccacctcccgggttcacgccattctcctgcctcagcctcccaagtagctgggactacaggtgcccgccaccacgcccagctaattttttgtattttttagtagagacggggtttcaccgtgttagccaggatggtctcgatctcctgacctcgtgatccgcccacctcggcctcccagaatgctgggattacaggagtgaaaatttcataactttcgactatcactctcaaccccttctttgaagctccagtctcatattccatgtgactagcagggatcacctgggtcccccatatgcaccttaaacttagtccagtccaaagtaagcttcgcatttcctttccccagacttccaaaacctataccacccccttcattctgcaactcagttaacagcataactccctaccccagtcacttaggttggaaacctcagtcatttgattccttcttgaccccttcactgtctccctctccgccagcttatacagggggctagacctgcaaattctgtctctgtaatagcccttatgctcctattttctcttcattttcattttcactgccctaatcgaggccctcattgaacctttcctttggaactttacatatatcctctacacaatcagcaggattttcttgctgaaacacagttgatcattgctctcctgcttaaaatccttcaaaggctgttcacttacagaataaaataaaattacgtagcattttagctatgctggacaacacgttgttctattacataccactcctttccctgtgtctgtgttttttgcttatgctcatctgtttggattttttttcctcctgacagaattgtacttaggcctcaaagcctaattcaaaaggtcacttccttccctaagcctaacctacctcccaataatatttaatggtaatttcctctgtgattacccctatagaataacgtagcagttatgttatttaagggtaacataaagggtatttaacccattatgttatgctgtttgtgttgtatatgtctctgctctcaaaggctgtgagctctatgaggacaggaactatcttaatcaattgtgtattcctagcaccccatacaagtgcctggaatatagctacaatcaataaatgtttgtaaattgaattgaattgaagggacattacaacattgtagtataaatcactttgtagcctgagattgatcactactgcaaatactaaaagtggaagaacatatacctttactattcagtagaatagttttatggttaaatcaatagcatcgtgtaacatgtgatgatgtgcgtttatgcatttatccaaatatttgtaagtttaatactgaccacgatgtatatggctattgaagaaaaccacacataatatgtgtgtgaggtttgaaactagctctgttgcctagggctgtctttgtgccttgccagaatgtggaccgtggcatgatcggcctgaatatttagccatcctcatgatagcatgtggaataactggtttacagttcattcgtttcatacatactctgcctagcatgtaaaattaactggaaactgaggaattggagccaaagttagaaaatgaggagagttcaacttgaaccatcaggaaacaggctgattacatgaaggtctttttgtttgtttgtttttaacataataaatagagatggggtttcaccatgttgcccaggctggtctcaaacttgtgggctcaagcaatcctcctgcctcagcctcccgaagtgctgggattacaggcctgagccaccatgcccatcctatattttttttcaggcaatatccttttgtgctcaagaaattaagacacacaccccaccacaaactacatttgaagactctgccaaaaaaatgccatgttttttctcattttctttcatcagtaattaatgataccaagaacacttatatgcatggtttatagcagttggctatggtcaaaaaaagttgggcttcccctctgagacatttgcagatatatgtcctaggtataccatcagtggcaaataatgcttatcttaagatctaatctcacagggcatgctgggctcacgcctgtaatcccagcactttgggaggccaaggcaggaggatggcttgaggccaggagtttaagaccaacctgggcaacatggcaggaccctgtctctacaaaaaataaaaaaagttagccaggcatggtggcttacacttgtggtcccagctgcgcaggaggctgaggcagaaggatcacttgagcactagaggtggaggttgcagtgagctgagattggagtgccagtggactccagcctgggtgacagagcaagactctgtctcagaaaacaaaaaaaaaaaaaaaaaaaa

SEQ ID NO: 12805 - DNA, 464 bp, Homo sapiens
gaggcaggaggatcacttgaacctgggaggcggaggttgcagtgagccgagattgtgccactgcactccagcctgtgcaatagaatgagactctgtctcaaaatatatatataaataaataaaaaataaaaactagatggtagtggaggaggttacactaagaatagaacaacctcttcaagatagagtgaggctcagatgtcatacattgaatataccatgccgttcattcattctaagactgacttttgagaaattatgctagtagggcacagagaaataaggaagtgcttagttcagagggtgctttgtggctagcaactcctaggtctctccttacaacttagattgcaaagtaccaacaactagtatatgctgtattaggatttctagaaactgaatatcaagtctcagaccaggcacggtggctcacgcctataatccaagcactttgggaggctgag

SEQ ID NO: 12806 - DNA, 299 bp, Homo sapiens
ggcgcggtggctcacgcctgtaatcccagcactttgggaggccgaggcgggcggatcacgaggtcaggagatcgagaccatcccggctaacacggtgaaaccctgtctctactaaaaatacaaaaaattagctgggcgtggtggcaggcatctgtagtcccagctactcgggaggctggggcaggagaatggcgtgaactcaggaggcggagcttgcagtgagccgagatcacgccactgcacttcagcctgggcgacagagcaagactccatctcaaagaaaaaagaaaaaaaaaaac

SEQ ID NO: 12807 - DNA, 1915 bp, Homo sapiens
caaatgttggtttgtatatatattttttaaaaggcactagacttagaaatgccaaagtaattaattttctttattttcagaaacaatttagtgttcatggtacgaagtgtttctaaattgaaacactttcagattaatggatttaagataactggttgctcttttctataagtagtaataatgagatatggcttcagctacatatcagataccagatctcacttcctgttcctttatttcattcatccattcattcagcaaatatttgctgagcactaaaatgctccagacacagtgcatgaaccctgaagatataggcaaattgcataacccaagcaaagggccagagatgagcaacagcatggtacataccccaaactaagaacttcactatggctaggatatataatttagaagaaagaaggttaggttggggtaggaggaagcataataaattatgaatttagagatgtaatcaaattatgaagggtcatgaaagccttgtacaagattttgagtttgatctccatagagtcatataattagattaattttagaaagctcatagtgtctgcagtgtggagagtagattagaaggaagcaggcctggaagcagggagatcatttgggagacttttccaggacagagaaaatggtggtctaaactgggatggttgcaagggggatgaaaagaagtagatatttaagagaaaatttaagaatacttatttagttcaagaacgttcctgaaagaatgagcctaaccatattcttgatcatctaaggaaggtctattccttctcaaggacagctaagtaaactaataattgattctaagtgatgtaattgaacagttcaaagcagttattcgtcattagaaattattgatactggtcagataatacctactgagagctagtcccattaattttcatcataattataatcatagcatttaagccatattatttctcagcatttcctatgttccagttttatagcactgaatattttaaatggtttatattacttaatactcacagtagctttacaggtagatattattgttatttccattttacaggtggagaccaaggcttagagaagttaagtactttgcctaaagttacacaggttgtaaatggtaaagctattattggaacctagtgactttttagttactggcccagctgggattagaacccagctctatcctgtattattatttccaagacttttatttttgttggggttaattgctaatattctgtacaacttcgttttagcccagtcttgcatataatcatattttctgcataaataagataagctagagtttgagtgagcacatagtgaagaatattgactatttgtttttttctttccaattagttagggtaaagcaagtgtaaagggaagtggatggtaaggcattttgaggaggcaatcaaatatgtttttttctaattatatatttccaagccaataatttctttgaagaagaatgttttaagcgtgtttctttaccatgttaggccagtaggtacagagaaaataatattagctctttatgtcagcataggtaacaaagccttaaaaaattcacagctgaatgcaacagtgaaggccgttgacaagagaggttgcattacttcaaccagggctactgcagtgaaccaaaaaaagaactgagttctaggcttccatctccaggctacatcttaactgactaagagggcagtttagctgtccaggaagaactcgattgctaactctcactgataattttgcaacagtgacaataaagaatgaattttaaaaagaaaaacttgtctccctgaactattgaactccagaaaaagtagtacttacagtctttgctttaagagaaaccagttaaaaaaaaaaaaaaaaa

SEQ ID NO: 12808 - DNA, 451 bp, Homo sapiens
tgaaaataaattgtcaacctggaactatgtacctggaaacccatctttcatgtacaaagatgaagtaaaataaagattttcaaaaacgaggaatatttacagacctttgcgaagaagttttaaaggggtgtatttcataaaagtcccaagcaagttctgagatgcaagaatgaatatcgagccaatatactgattaaaatgtttcatataaatcatcattgtttctataaagtgataattgtaataatgtaatttgtaggactttttaaaaaaaatttctttaatttgagacggagtttctcgattcttttttatttgagacggagtttctctcttgttgcccaggctggagtgcaatggtgcgatctccactcactgcaacctccgcctcccccgttcgggggtttctcttgccccagcctcccaagtagttgggatcacaggcatgcgc

SEQ ID NO: 12809 - DNA, 423 bp, Homo sapiens
tggggaatgagaattctgctctttgcctttcctcttgggatgtgagacttttaataatcttgaaaaatgtcatgaatagccacagaaactcttagttccttttctttaaatgtaaaaaccattatccacaaggtatacttttcttcctggtttaattcagcagtttttccaattgtacctaggttttttacttacagattttaatgtaattcttatatgagttattttttaatatacatctgcaggtcactaataaggggattgtatcttcgtttggcctaagtccagcaatctgaaagttggaaggtaagaagcacttcgcaccatattcacaagttctgtttttgatcagagttgacattattgagtcagaatccagaaagcaacctcacttgtgacactgataggagtccaagggaacag

SEQ ID NO: 12810 - DNA, 2661 bp, Homo sapiens
ctgggattggcctgcggttgccagggaggagagtttggcggcagatggtggcacacaacatttagcgccatgcaaaggtacagaaaagattgcgcgaagcgaggctagcagtcggacctagtctccgccccttcctgctgtgttcaccatcccagcgtcccctgtcccctccacccgaagcgatgggtggttccgtcagggcgcttcccgcaccttcccgctccctgcttgcaaagtggttgtgccccaaggtccgcctccaggccacgtgggtgctgcgggccaagctttcccttcctttgagagaggtttccgctgtaggagcagagcttccgggctgcgctcttcgttgcccagtttccgctcagtggtcgcgtctccgccccccacccaccagtcccgctgcattctcggccgggctctaggcgccatggctccccgcgggaggaagcgtaaggctgaggccgcggtggtcgccgtagccgagaagcgagagaagctggcgaacggcggggagggaatggaggaggcgaccgttgttatcgagcattggtgaggggcctggagagtaacgggagagagggaacagtggcgccggggggggccaggggccccggtttctaacctctccgtctctccctagcactagctgacgcgtctatgggcgcaacgccgcggccctgagccaggcgctgcgcctggaggccccagagcttccagtaaaggtgaacccgacgaagccccggaggggcagcttcgaggtgacgctgctgcgcccggacggcagcagtgagtggggacctggatgtgggggagagggacgtgggtgaaagggacgtgggttccgaagacaggaagcgctattcttagaaaccacggcagtctcatgacttcagagacgtgctcgtgggttccgaagtattgtaacttcgcttcattctggcctttcaggtgcggagctctggactgggattaagaaggggcccccacgcaaactcaaattccctgagcctcaagaggtggtggaagagttgaagaagtacctgtcgtagggagatttgggtagaagccctcatgctgaggtttgaaatgggaagtggggggcgcgaccgctgttgaggaagagaaggcattgatcttggtgtggctacaagtacccacctggcgtgggtagctcacgcctgcaatcccagcactctgggaggtcgaggcaggagtggatggccaacacagggagaccctatttgaaaacaaaaaacaaaaaaaagacacaatattgttttctgtctagtgtgccctaagtggaatttatgtcctttgggagactgtagttgacttgccctgggggtatggacaagttttccatttggaagtttatttcatgttacttcatttatgcttatccctaccctcttctgtttggttcttgggtgttctgttactgtcctgtgttaacactgcattacaataccattaaatttggttacaaggattttgaccttgtctttgtccctagtgcttcatacagtgctttggcatgttgttctgcacttattatgttgagtgagatttggaggaaggatgcaatccttgagcttcagggtttgtgagttcaagggttggggaacatgtcttcctcagtccttaagattgcccggatcctttctctaaccttatttcccttctcatttttgcagctttgtgtccctggtgatgttggaacattaatgatggaacatggccaaacttcagtcatgatcctgaagccatggtttcttccctgccagaaatgaaggttcagttatgaggcaaccctctagtaaggcattgtaaaagttactggatttggtttaataaaagttgaaataaagtatttgagtaatagagtaaaacttaatcttaagggatggacaaagccagccttgtggagttggtagtccttgtgtttttcatagcccaagatagccatgtgacctggaacttttaaaaaaaaatttttttttaagagccagagtctcactttgtcacccatgctggagtatagtggtgctatctcggctcactgcaaccattgtctcccaggttcaagcgatactcctgcctcagtctcctgagtagctgggatcacaggtgcacaccaccacgcctggctaatttttttatttttatttttagtaaaggcggggtttcaccatgttggccaggctggtctcaaactcctgacctcaagtgatatgcctgccttgacctcccaaagtgctggggttacaggcatgatgagccaccgcacctggcctgacctgcaacttttatgatctctggtaaaacatgagaaatacttgtaaaaattatgggagcaaagtaaataatttattttttaaaaaagcaactgtatctttttcaacttactttttggaagtaatgatggaagtacatcttcttggcccctgcagaggttttagctagacttcctaatactggcagtgaataagccccacgttgggtgctggacagcatccatcactcccacccacttagtattccacccaacactgcttcacaccttcctctggaacattttcttaaacaataccccaccacagaggagggtgttctttctcagcttttcctaaattaccagtgactggatgccttatgacc

SEQ ID NO: 12811 - DNA, 2660 bp, Homo sapiens
ctgggattggcctgcggttgccagggaggagagtttggcggcagatggtggcacacaacatttagcgccatgcaaaggtacagaaaagattgcgcgaagcgaggctagcagtcggacctagtctccgccccttcctgctgtgttcaccatcccagcgtcccctgtcccctccacccgaagcgatgggtggttccgtcaggcgcttcccgcaccttcccgctccctgcttgcaaagtggttgtgccccaaggtccgcctccaggccacgtgggtgctgcgggccaagctttcccttcctttgagagaggtttccgctgtaggagcagagcttccgggctgcgctcttcgttgcccagtttccgctcagtggtcgcgtctccgccccccacccaccagtcccgctgcattctcggccgggctctaggcgccatggctccccgcgggaggaagcgtaaggctgaggccgcggtggtcgccgtagccgagaagcgagagaagctggcgaacggcggggagggaatggaggaggcgaccgttgttatcgagcattggtgaggggcctggagagtaacgggagagagggaacagtggcgccggggggggccaggggccccggtttctaacctctccgtctctccctagcactagctgacgcgtctatgggcgcaacgccgcggccctgagccaggcgctgcgcctggaggccccagagcttccagtaaaggtgaacccgacgaagccccggaggggcagcttcgaggtgacgctgctgcgcccggacggcagcagtaagtggggacctggatgtgggggagagggacgtgggtgaaagggacgtgggttccgaagacaggaagcgctattcttagaaaccacggcagtctcatgacttcagagacgtgctcgtgggttccgaagtattgtaacttcgcttcattctggcctttcaggtgcggagctctggactgggattaagaaggggcccccacgcaaactcaaattccctgagcctcaagaggtggtggaagagttgaagaagtacctgtcgtagggagatttgggtagaagccctcatgctgaggtttgaaatgggaagtggggggcgcgaccgctgttgaggaagagaaggcattgatcttggtgtggctacaagtacccacctggcgtgggtagctcacgcctgcaatcccagcactctgggaggtcgaggcaggagtggatggccaacacagggagaccctatttgaaaacaaaaaacaaaaaaaagacacaatattgttttctgtctagtgtgccctaagtggaatttatgtcctttgggagactgtagttgacttgccctgggggtatggacaagttttccatttggaagtttatttcatgttacttcatttatgcttatccctaccctcttctgtttggttcttgggtgttctgttactgtcctgtgttaacactgcattacaataccattaaatttggttacaaggattttgaccttgtctttgtccctagtgcttcatacagtgctttggcatgttgttctgcacttattatgttgagtgagatttggaggaaggatgcaatccttgagcttcagggtttgtgagttcaagggttggggaacatgtcttcctcagtccttaagattgcccagatcctttctctaaccttatttcccttctcatttttgcagctttgtgtccctggtgatgttggaacattaatgatggaacatggccaaacttcagtcatgatcctgaagccatggtttcttccctgccagaaatgaaggttcagttatgaggcaaccctctagtaaggcattgtaaaagttactggatttggtttaataaaagttgaaataaagtatttgagtaatagagtaaaacttaatcttaagggatggacaaagccagccttgtggagttggtagtccttgtgtttttcatagcccaagatagccatgtgacctggaacttttaaaaaaaaatttttttttaagagccagagtctcactttgtcacccatgctggagtatagtggtgctatctcggctcactgcaaccattgtctcccaggttcaagcgatactcctgcctcagtctcctgagtagctgggatcacaggtgcacaccaccacgcctggctaatttttttatttttatttttagtaaaggcggggtttcaccatgttggccaggctggtctcaaactcctgacctcaagtgatatgcctgccttgacctcccaaagtgctggggttacaggcatgatgagccaccgcacctggcctgacctgcaacttttatgatctctggtaaaacatgagaaatacttgtaaaaattatgggagcaaagtaaataatttattttttaaaaaagcaactgtatctttttcaacttactttttggaagtaatgatggaagtacatcttcttggcccctgcagaggttttagctagacttcctaatactggcagtgaataagccccacgttgggtgctggacagcatccatcactcccacccacttagtattccacccaacactgcttcacaccttcctctggaacattttcttaaacaataccccaccacagaggagggtgttctttctcagcttttcctaaattaccagtgactggatgccttatgacc

SEQ ID NO: 12812 - DNA, 793 bp, Homo sapiens
tggggggcgcgaccgctgttgaggaagagaaggcattgatcttggtgtggctacaagtacccacctggcgtgggtagctcacgcctgcaatcccagcactctgggaggtcgaggcaggagtggatggccaacacagggagaccctatttgaaaacaaaaaacaaaaaaaagacacaatattgttttctgtctagtgtgccctaagtggaatttatgtcctttgggagactgtagttgacttgccctggggggtatggacaagttttccatttggaagtttatttcatgttacttcatttatgcttatccctaccctcttctgtttggttcttgggtgttctgttactgtcctgtgttaacactgcattacaataccattaaatttggttacaaggattttgaccttgtctttgtccctagtgcttcatacagtgctttggcatgttgttctgcacttattatgttgagtgagatttggaggaaggatgcaatccttgagcttcagggtttgtgagttcaaaggttggggaacatgtcttcctcagtccttaagatgcccagatcctttctctaaccttatttcccttctcatttttgcagctttgtgtccctggtgatgtgggaacattaatgatggaacatggccaacttcagtcatgaacctgaagccctgggttctttcctgccggaaagaagggttaggtatgaaggaaaccttcttataagggattgtaaaagtactggatatgggttaataaaaggttaagaaaagtatttggggaataaaataaaa

SEQ ID NO: 12813 - DNA, 2245 bp, Homo sapiens
ctgggattggcctgcggttgccagggaggagagtttggcggcagatggtggcacacaacatttagcgccatgcaaaggtacagaaaagattgcgcgaagcgaggctagcagtcggacctagtctccgccccttcctgctgtgttcaccatcccagcgtcccctgtcccctccacccgaagcgatgggtggttccgtcaggcgcttcccgcaccttcccgctccctgcttgcaaagtggttgtgccccaaggtccgcctccaggccacgtgggtgctgcgggccaagctttcccttcctttgagagaggtttccgctgtaggagcagagcttccgggctgcgctcttcgttgcccagtttccgctcagtggtcgcgtctccgccccccacccaccagtcccgctgcattctcggccgggctctaggcgccatggctccccgcgggaggaagcgtaaggctgaggccgcggtggtcgccgtagccgagaagcgagagaagctggcgaacggcggggagggaatggaggaggcgaccgttgttatcgagcattggtgaggggcctggagagtaacgggagagagggaacagtggcgccggggggggccaggggccccggtttctaacctctccgtctctccctagcactagctgacgcgtctatgggcgcaacgccgcggccctgagccaggcgctgcgcctggaggccccagagcttccagtaaaggtgaacccgacgaagccccggaggggcagcttcgaggtgacgctgctgcgcccggacggcagcagtaagtggggacctggatgtgggggagagggacgtgggtgaaagggacgtgggttccgaagacaggaagcgctattcttagaaaccacggcagtctcatgacttcagagacgtgctcgtgggttccgaagtattgtaacttcgcttcattctggcctttcaggtgcggagctctggactgggattaagaaggggcccccacgcaaactcaaattccctgagcctcaagaggtggtggaagagttgaagaagtacctgtcgtagggagatttgggtagaagccctcatgctgaggtttgaaatgggaagtggggggcgcgaccgctgttgaggaagagaaggcattgatcttggtgtggctacaagtacccacctggcgtgggtagctcacgcctgcaatcccagcactctgggaggtcgaggcaggagtggatggccaacacagggagaccctatttgaaaacaaaaaacaaaaaaaagacacaatattgttttctgtctagtgtgccctaagtggaatttatgtcctttgggagactgtagttgacttgccctgggggtatggacaagttttccatttggaagtttatttcatgttacttcatttatgcttatccctaccctcttctgtttggttcttgggtgttctgttactgtcctgtgttaacactgcattacaataccattaaatttggttacaaggattttgaccttgtctttgtccctagtgcttcatacagtgctttggcatgttgttctgcacttattatgttgagtgagatttggaggaaggatgcaatccttgagcttcagggtttgtgagttcaagggttggggaacatgtcttcctcagtccttaagattgcccagatcctttctctaaccttatttcccttctcatttttgcagctttgtgtccctggtgatgttggaacattaatgatggaacatggccaaacttcagtcatgatcctgaagccatggtttcttccctgccagaaatgaaggttcagttatgaggcaaccctctagtaaggcattgtaaaagttactggatttggtttaataaaagttgaaataaagtatttgagtaatagagtaaaacttaatcttaagggatggacaaagccagccttgtggagttggtagtccttgtgtttttcatagcccaagatagccatgtgacctggaacttttaaaaaaaaatttttttttaagagccagagtctcactttgtcacccatgctggagtatagtggtgctatctcggctcactgcaaccattgtctcccaggttcaagcgatactcctgcctcagtctcctgagtagctgggatcacaggtgcacaccaccacgcctggctaatttttttatttttatttttagtaaaggcggggtttcaccatgttggccaggctggtctcaaactcctgacctcaagtgatatgcctgccttg

SEQ ID NO: 12814 - DNA, 2660 bp, Homo sapiens; identical to SEQ ID NO: 12811

SEQ ID NO: 12815 - DNA, 623 bp, Homo sapiens
  SITE (95): n equals a,t,g, or c
caattttgttttctgtctagtgtgccctaagtggaaatttatgtctttgggaagactgtagtgtacttgccttggggggtaggaacaagttttcncatttggaagtttatttcatgtacttcatttatgcttatccctaccttcttctgtttggttcttgggtgttctgtaactgtcctgtgttaacactgcattacaataccattaaatttggttacaaggattttgaccttgtctttgtccctagtgcttcatacagtgctttggcatgttgttctgcacttattatgttgagtgagatttggaggaaggatgcaatccttgagcttcagggtttgtgagttcaagggttggggaacatgtcttcctcagtccttaagattgcccagatcctttctctaaccttatttcccttctcatttttgcagctttgtgtccctggtgatgttggaacattaatgatggaacatggccaaacttcagtcatgatcctgaagccatggtttcttccctgccagaaatgaaggttcagttatgaggcaaccctctagtaaggcattgtaaaagttactggatttggtttaataaaagttgaaataaagtatttgagtaatagagtaaaa

SEQ ID NO: 12816 - DNA, 2297 bp, Homo sapiens
ggacaagagggtcacttggattgtggagttctttgccaattggtctaatgactgccaatcatttgcccctatctatgctgacctctcccttaagtgagtagtgcaaagggagggatggtggaaatggagatgctgtgccttccctctcactgtttttggcttttctttttcttttggccttgattttcacacatggtaaccaaaggcatctccctctcccctcttaaatatctatacttccactttccttgatccattattttttttcagcatattaaataatatattcttttcagatacaactgtacagggctaaattttgggaaggtggatgttggacgctatactgatgttagtacgcggtatgtaaagacctgggcagagggtctgagcagggaaatcactttgagtgatacatacagggacatttagagaactttctgggccctgcaggtacaaagtgagcacatcacccctcaccaagcaactccctaccctgatcctgttccaaggtggcaaggaggcaatgcggcggccacagattgacaagaaaggacgggctgtctcatggaccttctctgaggtacctgaaaggaagggcaggtgcatgaagggtgcagaacagtaggtgggctttcaagccctacccgggtttgattcacagctctgccacttgcccattagctttgagggtgtggactagttactagacctcatgttttaattcatttagcaaatatatattatgtgcagacctgctagtactgggtaacaatcattagttaagatttggtctcaggccaggcacggtggctcacgcctgtaatcccagcactttgggaggccgaggctggcagatcacctgaggtcaggagtttgagaccagcctgaccaacatggagaaaccccgtgtctactaaaaatacaaaaatagccgagtgtggtggcgcatgcctataatgccagctatttgggaggctgaggcaggagaatcacttgaacccgggaggtggaggttgcagtgagctgagattgcaccattgcggtccagcctgggcaacaagagactccatcaggaaaaaaaaaaaaagattctgtctcgaaggccattgcccctatggtctgtaggttttaggtcccctgtcagttattggggggtaataaccccgggcttacaggcttgtttgcagattacattaaataatttaggtataattcttggcacggtgattggcacataatgggtatttaactattagttgacttttctgggtacctaaaaaagaggaaggttagggaagatttttgtcctttgcttactccttcctttcccagactttgtgtaaaatacctcttacttcccaggctctttactctcccttccaacccagatcctgacgtgtgcatctcttttgtgcaggagaatgtgatccgagaatttaacttaaatgagctataccagcgggccaagaaactatcaaaggctggagacaatatccctgaggagcagcctgtggcttcaacccccaccacagtgtcagatggggaaaacaagaaggataaataagatcctcactttggcagtgcttcctctcctgtcaattccaggctctttccataaccacaagcctgaggctgcagccttttatttatgttttccctttggctgtgactgggtggggcagcatgcagcttctgattttaaagaggcatctagggaattgtcaggcaccctacaggaaggcctgccatgctgtggccaactgtttcactggagcaagaaagagatctcataggacggagggggaaatggtttccctccaagcttgggtcagtgtgttaactgcttatcagctattcagacatctccatggtttctccatgaaactctgtggtttcatcattccttcttagttgacctgcacagcttggttagacctagatttaaccctaaggtaagatgctggggtatagaacgctaagaattttcccccaaggactcttgcttccttaagcccttctggcttcgtttatggtcttcattaaaagtataagcctaactttgtcgctagtcctaaggagaaacctttaaccacaaagtttttatcattgaagacaatattgaacaaccccctattttgtggggattgagaaggggtgaatagaggcttgagactttcctttgtgtggtaggacttggaggagaaatcccctggactttcactaaccctctgacatactccccacacccagttgatggctttccgtaataaaaagattgggatttccttttgatt

SEQ ID NO: 12817 - DNA, 397 bp, Homo sapiens
ctcccacctgtctttcccagaccagatgggtttggggtgctctgcagaggactagctctgcctggttttggcttgtcctctggtgttctttatttacactcctctgccgccaaagacgccggccaggggttgcaggcactgagctagatccacttaaaatgctggaaggctttgatgtacagataccaggagatggctttgagcgactgagcctgatctttctgggcaacaggtgtttgtccacagaggggtacaagctgggtggggagagcactgtaggatcaagggcagtgtcattcttgttctctctaggctcttgactatggcttgatggtgaagagtttttttcttgtggagttgggcaggctctggccttcctcttgagcagaagagtgcc

SEQ ID NO: 12818 - DNA, 398 bp, Homo sapiens
ctcccacctgtctttcccagaccagatgggtttggggtgctctgcagaggactagctctgcctggttttggcttgtcctctggtgtttctttatttacactcctctgccgccaaagacgccggccaggggttgcaggcactgagctagatccacttaaaatgctggaaggctttgatgtacagataccaggagatggctttgagcgactgagcctgatctttctgggcaacaggtgtttgtccacagaggggtacaagctgggtggggagagcactgtaggatcaagggcagtgtcattcttgttctctctaggctcttgactatggcttgatggtgaagagtttttttcttgtggagttgggcaggctctggccttcctcttgagcagaagagtgcc

SEQ ID NO: 12819 - DNA, 3369 bp, Homo sapiens
gagagaagtggagatcctgatgtttctcagtgccattgtgatgatgaagaaccgcagatccagtaagtttagttcacttctcagactcaaggttagatctaatgccctttggaggtgctttgcttcatgttaagagagtggcaatcatttggtaaatttgtcctacgtttaattccaaggctgaatttgaacttggacttctatcccctccctgtctcctatttcaaagtgccccatgaagagggacaaagaatgggatataggagtgcacagcccagcctgacctgtgacatctctgtgtttcagtcactgtggagcaacatataggcaacattttcatgtttagtaaagtggccaacacaattcttttcttccgcttggatattcgcatgggcctactttacatcacactctgcataggtgaggagactgcctttctttctttttttttttttgtaagactgtgttgatagacttgattgtggaaaccacagtcccaacagttgcaatcccaaacatgtttctccatacccttcttccatatctcatacctaatgaattatatatgtagctcagatgataacagtttacagagactgttattgtagaggtagggaatgtgttggtggtctacatatatccacaagtgtgtattatttgggggctgaaatccttgggttggtttggaagtaaattccctgtgtaaggctttttatgtttccttcgacatcttctttctgtatttagtgttcctgatgacgtgcaaaccccccctatatatgggccctgagtatatcaagtacttcaatgataaaaccattgatgtgagtgctctttcccctttctgtttcttgggtcccttgtgggtgattttgtagttgtgctctccattcactaggaggaacaacagtgcttcaaaatggatgtcacgggcactgtggttcattatgagagccgggggagagggaacaccaggatgaggaattagatgctaaagtctgaaccttcccaggaggctatgtggatccagctgacttttcttccctgtatttggcaggaggaactagaacgggacaagagggtcacttggattgtggagttctttgccaattggtctaatgactgccaatcatttgcccctatctatgctgacctctcccttaagtgagtagtgcaaagggagggatggtggaaatggagatgctgtgccttccctctcactgtttttggcttttctttttcttttggccttgattttcacacatggtaaccaaaggcatctccctctcccctcttaaatatctatacttccactttccttgatccattattttttttcagcatattaaataatatattcttttcagatacaactgtacagggctaaattttgggaaggtggatgttggacgctatactgatgttagtacgcggtatgtaaagacctgggcagagggtctgagcagggaaatcactttgagtgatacatacagggacatttagagaactttctgggccctgcaggtacaaagtgagcacatcacccctcaccaagcaactccctaccctgatcctgttccaaggtggcaaggaggcaatgcggcggccacagattgacaagaaaggacgggctgtctcatggaccttctctgaggtacctgaaaggaagggcaggtgcatgaagggtgcagaacagtaggtgggctttcaagccctacccgggtttgattcacagctctgccacttgcccattagctttgagggtgtggactagttactagacctcatgttttaattcatttagcaaatatatattatgtgcagacctgctagtactgggtaacaatcattagttaagatttggtctcaggccaggcacggtggctcacgcctgtaatcccagcactttgggaggccgaggctggcagatcacctgaggtcaggagtttgagaccagcctgaccaacatggagaaaccccgtgtctactaaaaatacaaaaatagccgagtgtggtggcgcatgcctataatgccagctatttgggaggctgaggcaggagaatcgcttgaacccgggaggtggaggttgcagtgagctgagattgcaccattgcggtccagcctgggcaacaagagactccatcagggaaaaaaaaaaaagattctgtctcgaaggccactgcacctattgtctgtaggtgttaggttccctgtcagttaattggaggtaataacccctggcttacagggttgttttgcagattacattaaataatttaggtataattcttggcacggtgattggcacataatgggtatttaactattagttgacttttctgggtacctaaaaaagaggaaggttagggaagatttttgtcctttgcttactccttcctttcccagactttgtgtaaaatacctcttacttcccaggctctttactctcccttccaacccagatcctgacgtgtgcatctcttttgtgcaggagaatgtgatccgagaatttaacttaaatgagctataccagcgggccaagaaactatcaaaggctggagacaatatccctgaggagcagcctgtggcttcaacccccaccacagtgtcagatggggaaaacaagaaggataaataagatcctcactttggcagtgcttcctctcctgtcaattccaggctctttccataaccacaagcctgaggctgcagccttttatttatgttttccctttggctgtgactgggtggggcagcatgcagcttctgattttaaagaggcatctagggaattgtcaggcaccctacaggaaggcctgccatgctgtggccaactgtttcactggagcaagaaagagatctcataggacggagggggaaatggtttccctccaagcttgggtcagtgtgttaactgcttatcagctattcagacatctccatggtttctccatgaaactctgtggtttcatcattccttcttagttgacctgcacagcttggttagacctagatttaaccctaaggtaagatgctggggtatagaacgctaagaattttcccccaaggactcttgcttccttaagcccttctggcttcgtttatggtcttcattaaaagtataagcctaactttgtcgctagtcctaaggagaaacctttaaccacaaagtttttatcattgaagacaatattgaacaaccccctattttgtggggattgagaaggggtgaatagaggcttgagactttcctttgtgtggtaggacttggaggagaaatcccctggactttcactaaccctctgacatactccccacacccagttgatggctttccgtaataaaaagattgggatttccttttgatt

SEQ ID NO: 12820 - DNA, 3369 bp, Homo sapiens
gagagaagtggagatcctgatgtttctcagtgccattgtgatgatgaagaaccgcagatccagtaagtttagttcacttctcagactcaaggttagatctaatgccctttggaggtgctttgcttcatgttaagagagtggcaatcatttggtaaatttgtcctacgtttaattccaaggctgaatttgaacttggacttctatcccctccctgtctcctatttcaaagtgccccatgaagagggacaaagaatgggatataggagtgcacagcccagcctgacctgtgacatctctgtgtttcagtcactgtggagcaacatataggcaacattttcatgtttagtaaagtggccaacacaattcttttcttccgcttggatattcgcatgggcctactttacatcacactctgcataggtgaggagactgcctttctttctttttttttttttgtaagactgtgttgatagacttgattgtggaaaccacagtcccaacagttgcaatcccaaacatgtttctccatacccttcttccatatctcatacctaatgaattatatatgtagctcagatgataacagtttacagagactgttattgtagaggtagggaatgtgttggtggtctacatatatccacaagtgtgtattatttgggggctgaaatccttgggttggtttggaagtaaattccctgtgtaaggctttttatgtttccttcgacatcttctttctgtatttagtgttcctgatgacgtgcaaaccccccctatatatgggccctgagtatatcaagtacttcaatgataaaaccattgatgtgagtgctctttcccctttctgtttcttgggtcccttgtgggtgattttgtagttgtgctctccattcactaggaggaacaacagtgcttcaaaatggatgtcacgggcactgtggttcattatgagagccgggggagagggaacaccaggatgaggaattagatgctaaagtctgaaccttcccaggaggctatgtggatccagctgacttttcttccctgtatttggcaggaggaactagaacgggacaagagggtcacttggattgtggagttctttgccaattggtctaatgactgccaatcatttgcccctatctatgctgacctctcccttaagtgagtagtgcaaagggagggatggtggaaatggagatgctgtgccttccctctcactgtttttggcttttctttttcttttggccttgattttcacacatggtaaccaaaggcatctccctctcccctcttaaatatctatacttccactttccttgatccattattttttttcagcatattaaataatatattcttttcagatacaactgtacagggctaaattttgggaaggtggatgttggacgctatactgatgttagtacgcggtatgtaaagacctgggcagagggtctgagcagggaaatcactttgagtgatacatacagggacatttagagaactttctgggccctgcaggtacaaagtgagcacatcacccctcaccaagcaactccctaccctgatcctgttccaaggtggcaaggaggcaatgcggcggccacagattgacaagaaaggacgggctgtctcatggaccttctctgaggtacctgaaaggaagggcaggtgcatgaagggtgcagaacagtaggtgggctttcaagccctacccgggtttgattcacagctctgccacttgcccattagctttgagggtgtggactagttactagacctcatgttttaattcatttagcaaatatatattatgtgcagacctgctagtactgggtaacaatcattagttaagatttggtctcaggccaggcacggtggctcacgcctgtaatcccagcactttgggaggccgaggctggcagatcacctgaggtcaggagtttgagaccagcctgaccaacatggagaaaccccgtgtctactaaaaatacaaaaatagccgagtgtggtggcgcatgcctataatgccagctatttgggaggctgaggcaggagaatcgcttgaacccgggaggtggaggttgcagtgagctgagattgcaccattgcggtccagcctgggcaacaagagactccatcaggaaaaaaaaaaaaagattctgtctcgaaggccactgcacctattgtctgtaggtgttaggttccctgtcagttaattggaggtaataacccctggcttacagggttgttttgcagattacattaaataatttaggtataattcttggcacggtgattggcacataatgggtatttaactattagttgacttttctgggtacctaaaaaagaggaaggttagggaagatttttgtcctttgcttactccttcctttcccagactttgtgtaaaatacctcttacttcccaggctctttactctcccttccaacccagatcctgacgtgtgcatctcttttgtgcaggagaatgtgatccgagaatttaacttaaatgagctataccagcgggccaagaaactatcaaaggctggagacaatatccctgaggagcagcctgtggcttcaacccccaccacagtgtcagatggggaaaacaagaaggataaataagatcctcactttggcagtgcttcctctcctgtcaattccaggctctttccataaccacaagcctgaggctgcagccttttatttatgttttccctttggctgtgactgggtggggcagcatgcagcttctgattttaaagaggcatctagggaattgtcaggcaccctacaggaaggcctgccatgctgtggccaactgtttcactggagcaagaaagagatctcataggacggagggggaaatggtttccctccaagcttgggtcagtgtgttaactgcttatcagctattcagacatctccatggtttctccatgaaactctgtggtttcatcattccttcttagttgacctgcacagcttggttagacctagatttaaccctaaggtaagatgctggggtatagaacgctaagaattttcccccaaggactcttgcttccttaagcccttctggcttcgtttatggtcttcattaaaagtataagcctaactttgtcgctagtcctaaggagaaacctttaaccacaaagtttttatcattgaagacaatattgaacaaccccctattttgtggggattgagaaggggtgaatagaggcttgagactttcctttgtgtggtaggacttggaggagaaatcccctggactttcactaaccctctgacatactccccacacccagttgatggctttccgtaataaaaagattgggatttccttttgatt

SEQ ID NO: 12821 - DNA, 313 bp, Homo sapiens
ttatgggagcaaagtaaataatttattttttaaaaaagcaactgtatctttttcaacttactttttggaagtaatgatggaagtacatcttcttggcccctgcagaggttttagctagacttcctaatactggcagtgaataagccccacgttgggtgctggacagcatccatcactcccacccacttagtattccacccaacactgcttcacaccttcctctggaacattttcttaaacaataccccaccacagaggagggtgttctttctcagcttttcttaaattaccagtgactggatgccttatgacc

SEQ ID NO: 12822 - DNA, 398 bp, Homo sapiens; identical to SEQ ID NO: 12818

SEQ ID NO: 12823 - DNA, 1214 bp, Homo sapiens
aaaaaaaaattctgtctcgaaggccactgcacctattgtctgtaggtgttaggttccctgtcagttaattggaggtaataacccctggcttacagggttgttttgcagattacattaaataatttaggtataattcttggcacggtgattggcacataatgggtatttaactattagttgacttttctgggtacctaaaaaagaggaaggttagggaagatttttgtcctttgcttactccttcctttcccagactttgtgtaaaatacctcttacttcccaggctctttactctcccttccaacccagatcctgacgtgtgcatctcttttgtgcaggagaatgtgatccgagaatttaacttaaatgagctataccagcgggcaagaaactatcaaaggctggagacaatatccctgaggagcagcctgtggcttcaacccccaccacagtgtcagatggggaaaacaagaaggataaataagatcctcactttggcagtgcttcctctcctgtcaattccaggctctttccataaccacaagcctgaggctgcagccttttatttatgttttccctttggctgtgactgggtggggcagcatgcagcttctgattttaaagaggcatctagggaattgtcaggcaccctacaggaaggcctgccatgctgtggccaactgtttcactggagcaagaaagagatctcataggacggagggggaaatggtttccctccaagcttgggtcagtgtgttaactgcttatcagctattcagacatctccatggtttctccatgaaactctgtggtttcatcattccttcttagttgacctgcacagcttggttagacctagatttaaccctaaggtaagatgctggggtatagaacgctaagaattttcccccaaggactcttgcttccttaagcccttctggcttcgtttatggtcttcattaaaagtataagcctaactttgtcgctagtcctaaggagaaacctttaaccacaaagtttttatcattgaagacaatattgaacaaccccctattttgtggggattgagaaggggtgaatagaggcttgagactttcctttgtgtggtaggacttggaggagaaatcccctggactttcactaaccctctgacatactccccacacccagttgatggctttccgtaataaaaagattgggatttccttttgatt

SEQ ID NO: 12824 - DNA, 3370 bp, Homo sapiens
gctggccgaggacctgaaggtgcagctggagcacgtgcagactcggctgcgggagatccagccctgcctggcagagagccgggctgctcgtgagaaagagagcttcaacctcaagagggctcaggtgtgtgcaggggtgaggggccaggccagggtggtccacggtcacggacctatcctgggggcaagcggctcaaggttgaggacccttgcccttagccaggcctctcctgccccaggaggacatctcacggctgcggcgcaagctggaaaagcagaggaaggtggaggtctacgcagatgccgacgaaatcctccaggaggagatcaaggagtacaaggtggggctgtgggccaagttgtgccctatccacctgagaattgtagatgcaggattgctgagactagtggagagtctggggaccctggaagtaatgtagggcagcagaaagtgggcagcacagtggtcacagagtcaaatgctgtttgctgtacatgtactgtgagccaggcacagtgcttggctgggtgtgggttgggaggctaggaactggccctggtctctgacttcttgaaactgacagtcaggggaggaggcagccaagtaattctctcatcccagatgtgtaatatgatggcagaggccagaggggctgaggggactcaggggaggcccttcccctggccctggggtcagcaggcttcctggagtgaatgtcaccacagcagacctgaagaataggccagacgtggctgtgaggaacgggagtgagtagctttaggcaaagggaacagcagatgtggacgcttgagcggaggggttgctgggacagcaccggaggttgtaatcagaggagccaatgtggagaggttgggccgtgtcccctccctgaagagtgcggtacgccaggttgagacctcaaagggttttaaacaggagagtgatgtggttagatttgttgttggttttgggctggaagaggtagactggaggcagggaaattgttaaggtattgctttcactgaggccccccccacagtagatgggttcaggagacattcagaggcagaattgcttggactcgggggtggatcgaatgcatggagtgagggaaagggaacacttggaggactcctggtttcctggtttgagaaactaggtggatagttagtaccatttagggggttaggaggcctgcgggggagcaggttctatgggatggtgtcaaaggatgctgagaaggtgcctgtgggacccctttgggaggctgggaaggtgctcaaggcaaaagggccgggctggagaacaggcttggggaatgtcagtagaggcagaggtggaagccacatatgacttggtcatcccttggaagcagttgagccttgaagggcagaggcagctggaggcagccatggggtagaggcaggcttgggagcctgttcagtgctggtgtgtagggtcctgggagacaggagtgatggcagggaggctgctgaggcggcaggctgggctgggattttagcaggctggaggagcactgttgggggatgctgagttgagtcaatccatgtctggagttggaggtgagaccctcctggtggcggaagagaggtctcaggctaagaagggacccacggcagggtctctggccagtgtcgaggctgggcccagttgagggtagagagaacagatttctagttgcattgccattccagctgtgacttagcaagtgcaggtgaagaggtagacaagattgggatttcaccagaggcggccagtggggcaggagatgaagccccaaggcagagtccaggctgggcctgtgggtccttgtccttttgaggggacacatgatagccatcactgcccagtgatgaatccggactctgctgatttctagtgttgagaccttggcctctgcacctcagtttgctcattcatagagtgctcgtccttacctccagggttatgggaggatgaggtgcagtctccagtgtggtgggcttggcctggactcctcctgctgtcagcttggggtctgggcactgtcagagttgttcccaagctgatgcctttgcctggcccaggcgcggttgacctgcccctgctgtaacacccgcaagaaggatgcagtccttaccaagtgcttccacgttttctgcttcgagtgcgtgcggggccgctatgaggcccgccagaggaagtgccccaagtgcaacgcggcctttggtgcccacgacttccatcgtatctacatcagctgaacctgaaactcaggggactctggaacaccatggaccctgggggctgtgcccccatctcctccccaccccaggtctagtggccccaccctccattccggaccccatgggcccagcccctgcccatctagttggtttggggaccctggtgcatgctagtgggcatgggatcagccaagcttcgttccatcttttcctaaaggtcagagctgcagcctagggggcactgccctacagaaaaggtctgcctgagaggcctgaggagcccagagcacttgactgagcttcccggaaactggccctaacctgtctgtctccgtggatgcatcctaaccctaaggaaaattccccaggctgtgatctaccctagagaaggctcgctccctgcctactggctcacaaatgaggaccagtgagccatgtccttgttccttgtttgagactgggctgcaggccccaggaagactttccttcacccaccatccccctaacctcggcagggcttctgtcctgtggagttccctggacaccttggtctggctcttgtgccaagggatgaaggaggtacccttttggcagatgggggcatcacttgcttcctttgggaagctttaaggttgctgcagtcaccttcctcatcttgcaggtgcctgaaccaacatcatcagtttctattctaatcaggccccttcccaatctccatttctctgccaagcccatttacccccacctcatgcatcccaaggctctactgggtccctggacctaaccctgctttcatcctggtggccttaactacagtggaggtggaacttcccaggaggggaagggacagaccagccccagccgctgggccaacttccaatcattccagctagaagagcttccccctgacaccctgtgactgagcctgtgtcctgtctgcctgcccagccatgctccatcggctgtgagggcagtgcccggagaggccagagggttggagctgcagggacccgtttggacccacagcctctgttctagagatgcttgtataggctgttaattgtgatgaataaacgttcaaccctcggcctgcagccagagtagccaggccgcgcaccccaaa

SEQ ID NO: 12825 - DNA, 789 bp, Homo sapiens
aaaggccggcctgaactggatcctgcggaccgcttctcagcggcttcacccccacaccactcgaatgcacagatcgggacacctcagctgggtgacttccctcgttgcaatcggcctcgggagcggtgcggcgtgtaccgagcggcgcccctgggctcagcgcgctgcaggcgccccgggcggatccttcaccgaggcaggactggggctggcgccagagccggtgcggagcggtgttggttcaggcgctggcgacagtgctatggccacggcaggggccgcgtgcgtctcagcggtggcgccttcggaccctattggcgcccgggacttaagcggggccgccgctgctggaccaggacgaactggagaaggagacgcgggccgccacggtgacctcgggcgtagggccggcggcggcgggcacgctggtggaagcgcgggccgcggcaggggaggacatcgggccgcagagaaagtgccgatggcctggggcagcggtgcgagggtgggaaaaacgcaggatattgcatcatagagacgcggccaccttcgcccctggagagcgccagtctcaggagcgccgcaccggtcacgggtggaggtcagccaggcctccgtaagcgcggtccccttccaggagtagccttcgcctgggctcttgagtagatgccaagtaattccgcatcgtctctctagatatctgcgctaaaggccacccggtctccttatcagaggggcaaaactctcctcgtgggtcttcatacctaataaaagtcggcatcaaaccac

SEQ ID NO: 12826 - DNA, 157 bp, Homo sapiens
tcatgaggtcaggagatctagaccatcctggctaacacggtgaaaccccatctctactaaaaatacaaaaaattagctgggtgtggtggtgggcgcctatagtcccagctactcgggaggctgaggcaggagaatggtgtgaacccaggagtcggag

SEQ ID NO: 12827 - DNA, 4687 bp, Homo sapiens
gccggctagatatggcgtcctctttgcttgcgggcgagcgattggtgcgtgctttgggccccggcggggagctggagccagagcggctaccccgaaagctgcgggccgagcttgaggccgcgctggggaagaagcacaagggcggtgatagctccagtggcccccaacgcttggtttctttccgtctcatccgggatctgcaccagcatctgagagaaaggggtgagccccagtctccagtccggggtcccctccttgtgtccagatcgattccctcctgaggtcttttcccatcattccccttcttctacggagcactcatctagacaagtcaagagtcactccataaatcccagggccacccactttcttaactcccatgggaatttctcgtggatgacaaatttgcttgtgcagtttctgctcttttgagagccccctcttcacttccaggcacacctaggcccaattcacccttgagaaagtctaggtttttaccaaatacaaatatcacaggttttgtctcttctttttctccactttaggaatcagcttagcatagtgagcttgtaggaatccggatttctttccacctcaaaagcaagagtggtgaaatctgatactttgttttgtttgtttgtttttttaatataggatggcaaaagctgtgttgaaagatctggcctgagagtagcatgtgagttccagtcctagctctgtcactaatcctttgaaggagtcatttctcctcgctgggcctcagttcccttatgtgtaaagggaaggaacaggacaaactagcacataaggtattttgccagaagtaacatagaccagccagaagtgcaaagggtagactgctcaattattagaactagaaaggaccttagaaagagattgcctagtattagtgtcctctgagcatttagcatcactatgacctaaacttatttagggaagagctgttgtggccacagaactgatctaacccaaaggcacaagtaaatggcttacttgttagttataacactggcaggataattgagagctgacagctaaagtcacctgcgcagcactgggagatacctacatggaattatccaaaattcttttcaattgaaaatgatcctggaaatggattaatgtagagatggccctgttttattttggtagaaagaagggctacacccctcttgatcttaacccttcaacctcagctcgtggatcattgtgtttgtgaaaccttttcttctcagattccaaactatacctccatgagctcctagaaggcagtgaaatctatctcccagaggttgtgaagcctccacgggtatgtaagggatatgtttgtgagagtggttattgactgagttgggcttatccatgatacactgaacttataaatcaacttttaggcttgaaaaattgtttttgaaatctttgggatctgggggagccagatattgtcctccccatcagctgtttggaaaattgagatcaaaaaaaaaaaaaacagtttcaaagcactggagttacgactagtatgtgggtctcctgatacctttagcagtgctttacccctggaaccaatgattgtgatgtgctttctaacaagctgggaatatcattcttctcatttgatttttctgcttcagaacccagaactagttgcccggctggagaagattaagatacagctggccaatgaggaatataaacggatcacccgcaacgtcacttgtcaggtaaggacatgctcttcagtacgtggtctaggtagcccctcagagtagggccctgcagtggaagaagatacagagtttagaaaaaacatggaaacttggtttctatactgttcagggaccataggaagtctgcatacaaacaacacagttcccatctcattcactgagactctgggctgagatggtgaccaagttttaaacgtcatagaagtgggagttagccgggcacggcgctcatgcctgtaatcctagcactttgggaggctgaggtaggtggatcacttgaggtcgggagttcgtgaccagcctggccaacatggtgaaaccccgtctttacaaaaaatacaaaacttagcctggcgtggtggcgggcacctgtaatcccagctactcgagaggctgaggcaggagaatcacttgaacccaggaggcggaggcagaggctgctgtgagccaacactgcaccattgcactccagcctgagcaacaagagcaagactccatctcaaaataaataaataaataaataaataagtgggaatgaatcttggaggctttttttcttcttcttttttttttttgagatggagtctcactctgtcacccaggctggagggcagtggcaggatctctgctcactgcggcctccgccttccaggtttaagtgattcttatgcctcagcctcccaagtagctgggattacaggcatgcaccaccacgccaggctaattttttgtatttttagtagagaccacgttggccaggctggtcttgaactcccagcctcaaggtgatcctcctgcctcggcctcccaaagtgctgggattacaaggtgagccactgtgcccagccattcgagcatttcttctgacagggctccctactactctatggcatgctcctaccctggaacaggagagtagatgggtactggcagcctatgtcctctctccgaaatgcctgctctgtagtccagaaaagagtcaaaatggttccagacaaaagaatccatggggagggcagagttaatatgttggggaatagagagggctgagccagactgtcaatggatgctctctgagctgcttctattctgaatcatcttctttttctttttcccaggatacaagacatggtgggactctcagcgacctgggaaagcaaggtgaggtactaggagatcaggcttctaaaaccttttcctgagatgggtcatgacactcaggcttgttgtttgactgaaacccagttggtgggggagccatgagataagagcacctcctagagaatgttgaactaaaggtgccctctctggctcctccccaaagtgagatcattgaaggctctggtcatcaccatcttcaatttcattgtcacggtggttgctgccttcgtctgcacttaccttggaagccaatatatcttcacagaaatggcctcggtgagtaggcactgggcagggcagggtgccctggtgggggtgttagtgggtaagggaggacgtatgtgaaagtgccttgcacaggttaggtattgaacagatatttatgccattaataaggggagcattagagctttccagcagtcacgggaggttaggtaataaccccaggagaagccacattctcttttcttcccctcccccaacttagagggtggttggggggctctccatcctcattaaagttgctggggtacagagctggttgttggcctgcatcccttaagcctggttctccccatctccagcgggtgctagctgcattgatcgtcgcctctgtggtgggtctggccgagctgtatgtcatggtgcgggcaatggaaggcgagctgggagaactgtaactggtgcttcatcatcaagtctagagaagactttgggggcttcaggctccaattggcagtcaccgactcagtcaacccatcagactttttgtattcagctccagttagtcagaagaccagcccaggccagctgctgtttctgtggggagccctaatcttctgtgaatttccaaagggagcattggaggagattgagataacacatctttaaaacagaaagaactggtcttggtctatcagtacctcttcctgaatctggtacccatctgccttctccagttcattctaaacactgctgggactagggtttttccatcaggagcaaatggaatccaggccttcccagaagtagaccatactgccttgaacttgtccatatgtacaaactgatcaccagctttctccatacatttttaatgcagacctgtaattgagttcagaagcctccaagaaaacagaaaggatcccctttctccagtttgtgctggaagaggagctgatcagagacatcaaataagagaaagatgggttgctagaggatggtagaactggaagcaaggcagctacctttttgcaaaaggaaatggtgttaggccccttttccagaagataagacagactcatagagattaaatgatcactatggtccttcttctgttaaatggagccaaagacgcctatgttgttctgaagtcttgtaatgtttaacttctgagaacttagattagtggtgtgatgatagagtctgtataacgcattgaaaagggtatcaggcttagttatttatccaataaatatttattgtatgcagggtattcctattttaactcctgtgacaacacaaagcatagcgatttccatagttctaactgttcagggtctgctcctcctggtacactctttttggttcactgtatgtactcctgttgtctttttttttttttccaaagcacttttctgttttcataaattatatactcattcactcagtggacacttcctctacaatgtttgccagtttctgttagttgggagaagtgtcagctgtgaaaagaaaaagtaggtggcattttacagtgtttccagtaacctgag

SEQ ID NO: 12828 - DNA, 1032 bp, Homo sapiens
agctgacatggtagcgcacgcctgtagtcccagctactcaggaggctaaggtgggaggatcacttgagcctgggaggcagaggttgcagtaagctgagtaagccaagatcatgctattgcactctagcctggatgacagagtgagaccttgtctcaatgaaaaagcagggggcactgggaggggagaaccaaatgccctatcctccagttctcagcatatagaagggagctctctcatctgctagccactcctgcctcactgtgccatgctttctgtaatgcactctgggtccagggactgcttggcaggaggtgggaagaacaagaagtttagggccttcccagtttcttagggcctgtctggagagggaactagcgtttactgagtttttacgatgtgttacacaccatgtaaagccctttacctacattatttcttataccccaaacagagagcaaataagtatccccattttttagtcacatagagttccagagttgccacagttacatcgcaaagtcaggatttgaatccagtgcagaccgcaaacaccatggttttctctccaaagcagagcagctccagaggtggaggtgactggaatgtcctagattcagtgggaccaggagctgggggtgctagcagaggctctcatctccccagggtcttgtcagtcagagtcctaaacccttcaattaactatccctctaatcccagctgaagcctgggtaatacctcccaccaagaggtatctgtgtggaacctggccctatttagggattaggtgatggagataaatttccatggcaaacggccctcgtccccgttcgtttgcagagcacaacaatccagattaaggtacagagtttgggttttatttggagattagttggtattacaggtgatggtgataccaaaacccaatgctgctatacctgcctccatcccagatctgtcaggttgtctccacagccccacatcagagggcatccaatctgatctttgtgaaaattaaatcaacataagcccca

SEQ ID NO: 12829 - DNA, 21833 bp, Homo sapiens
tcgacgagcgcaggatgtgagctcacagcttgggactgctgaggggcaggcggctgcaggctaggggcggctcggagtccgctggccacccagctgagaggagaggcgcccccggggacggtgagagccgggcccgccgatgccctcggggaagggatggacggcccctgctggagtagagcgagcccggccgggtcctgggggaaaaggcgcgggcggcgtaggggagatggagagctccgatctcccacggagggtgggcgtgagaaccggtgtgggtttctcggtagtgaggagtggtccgggctagagaagagcccacaccggccacatttcccaggactttttgggtgacgcttaacctttacacctagggtttctgctagatccgccactctagccctcagctttcctcccgccgtcctccgtgtctgacggatttctgggtccttcttccttttagacccctcctctttccacctccgcggctgtttgccctttgttgtgcttgggttcccattagcttcgttgcgtgagccacggatccgcccttagccccgggcatccccaaatatccacacacaaagtgcggaaggaagagcactgtggctatcagtggaaacttcattctcactggaattactttctggggcgtcacctgccacagaattcctggaacccattggtctgggcggaatgtgattgacgtcatccaggggctcaaagcaattgctttgtaggaaaggaagagattagctctggatccgccgacctctcttggcaggcctatcctttgagctcctttgcattggcagaacatgtatgtgtgctttctctgatcctgggaaaactaggactagacacaaaatacacagggaacttgctaatacctgttagagaggtggatttattcctttgaggtgggcgggaaaagggaaggtgatctcataccattctagtgtttcttagtcattggcaacctcctggtgagggctcacctcccatacccaacccctgtggcaaatgaaagagtctcccagacaagccgccaaaggaattcactgcttcacacagcacccacgctggctgtccacttccttggacattcttcccagggacttacctaaatcttttcagggacaatttcagtctaacaaactgacgtatgttaaatacttaaaatgtgcatggcattgtgctgagcaccattaggggaacacagcggtaaacttgggaaaccagtgccctgcttctgggttgcacttacaaggcatgagcaactgtaaactcctgcatgtgatgagcattcggtgaaatcattccactttttttctgtctccattattaccaatgtggtccaggctgccatcatctcttcttgcctagactactgcttcctctggtcttcccactttctctcttgcacctttacaattcattctctacccagcagcaagttatcttttcaaaatacactacaagcaagtcagatcatatcactcccctgcttgcaaccctccaattgattcatatactatatagcaattagtatgaaatccacctttgttatcatctaacgcctgccttccctgacttgacatcaaaccaacttccccctactgtctgtgcaccagccattatgaccgtatttctgatcctcaaacttgttttaattttgtcattgttgagatgagatttccctatgtcacccaggctgactttcccaggctcaagcagtcatcccacctcagcctcccgagcagctgggaccacaggcatgagccaccatatctggctaatttttttttatttgtagaaacaaactctcactatgttgcccagactggtcttgaactcctgggctcaagcaatccacccacttcggcctcctaaagtgctaggattacaggtgtgagccaccacacccgccccctaaaacttgtttctaacaggaactttgcacttactcttccatctgtctacaatgctctcttcaaacctcagctgaaatgtcaccatcccaaagatgcttttcctgtccctttgtctaaattagtgcctctccctaatcactctcatatcactgttttattatctttattgcatttatcaggttctggaattatctgcttatttatttaagtccttgttgctagtctgtttccttccactagaatgtaagctccatgtggacatgactttctatatgtgttctcttctgagtacccaatgcctggcacgtaggggtacaataaatgctagctttctctctttttaaaaattcctgttatgatgcttctttgaactgtttgaaggcaaagacaatattttttcattgttccctactgcttaacatagtaggcactcagtagtttaattgctgaatgagttaaatgagctagtacatattaaatgccaagagatggggtcttgctatgttgccaaggctggtcttgactcctgggctcaagagatcctcccacctcggcctactgagtagccaggagtacaggcaggtggcagcacacatctcacctcattgtttttagatttatcctctgatcttttctagtcctttcttctcccattcttattgggagggaagaggagagtagggctgggctccctctcaggaaaaagaaaggaaaacagccatcctatagctgttcttccctgaaaaatggtgacaatttcaggaacttgggacaaggctggtgccaagaaaggggaaggtcaggaagccccagccgaagcccaggtaacctgcaccaagaacactggccggcacccccgaccctggcttactgcattctctcctgaagctgcttttactttccttcctgaagccagactctcggtggtgctcaaaataaacactggcacagactgctctggaggctggaatctttagaaaggaagtgcatcctgtccctctggctcctgggaaactcctagactggctggattcccagtaggtttggttggaagtctgggatcctgggaaccttgacaagaaagtaactggaatctgactggtagatctctagggtgatctgttcctctggccctctctaactggttccatgggtttgcttgtcttcctcgctgccctgagtggagctgagtctcagggaggctgatgaggtgaccagggcaggagtctgggagactgcctccagccctggttcctgctatagtaaaaatggcagggaggccagacgcggtgattcatacttataatcccagcactttgggagactgaggtgggcggatcgcctgcgctcaggaattcgagaccagcctgggcagcatggtaaaaccctgtctctaccaaaaaaaaaaaaaaaaaaaattagctgggtgtggtggtgtgcacctgtggtcccagctactcaggaggctgaggtgggaggatcacttgagcctgggaggcaaaggctgcagtgagccgagatggcaccactgcactccagcctgggtgacagagtgagaccctgtctctaagaaaaaaaaaaaaaaaaaagaaagcaaaatggcagggacttagcctctgccagggagcagtgcttgggcttgtcagggagagaatgagtacggtcgtgtttctgctattgtctcctcctgggctgtctcagctggttcgtgtcttctcttccctctcccatgtacagcactgagattatgaggctctggcctccactggccactcactcgtgaccctttccaccacggcggagccttccaagcctacctcctgccgtgtggtgatctacctgcagcgggagatgtcgggggacacctgcctgtgcccagcctcaggggccaagcccaagctcagtggcttcaagggaggagggttgggcaacaagtatgtccagctcaacgtgggcggctctctgtactacaccactgtgcgggccctgacccgccacgacaccatgctcaaggccatgttcagtgggcgcatggaggtgctgaccgacaaagaaggtgaggcactggggctgccgctcggggtggggagggcaggaggagttcccaaggaaatgaccagatctagaattcagtcacttttcctcttcactttatgtagggtgtcttcacctggagtccctagtagagcttcagaattctgtgaaattgtatatggaatgctgtgtttatgcattttccaggaagaagagccatacttttaaaatatttaaataggacaagattctcataggagccgtcaccttaagactgggcagcgggcagaaggccggcagtggctggtggtttctgtgttgggctgggcctggtaccctgagcctaggcccctgtggcttctacagcctggagggctgtatcccccgtgggatgtgccagttctgggtttcagagaggaagggtgaagagcagccatgggcctgagtgctagaacctccatccccgcctctgtcaccctgcgtaagggctttgtgctcgtggacccccttccctgccacctgccgccagcttgtcaggtggcctttgcctgcctcggaggtacctggcggcaaactaaccctgtagggccttctgcacccctaggctggatcctcatagaccgttgtggaaagcactttggcaccattttgaattacctccgagatgacaccatcaccctccctcagaaccggcaagaaatcaaggaattgatggctgaagcaaagtattacctcatccaggggctggtgaatatgtgccagagtgccctgcaggtacatgggtggggcggagcagggcgggcagatgaggtcaggagttgcccccttcttgtgggatggaggactctggttcctggcaggttgtgtgggaggcgtggttgatgagtgcaaacctaatgagacaagtgagatgccacccaggcccaccaacctggcagccaggtgttcacacttggcagcgtgagtaggccctgcttctggtttctatgctttgctacccggattttagggggtttttctgtttttgcttttgtttctgtttttgtttttgttttttgagacagggtttcactcctgtcacccaggctggagtgcagtggtgcgatgtcagctcactgcaacttctgcctcctgggttcaagtgattctcgtgatttggccttcagagtagctgggaatgccagcatgcgccatggcacccagctaatctttgtattttttgtagagatgaggtttcaccatgttttccaggctagtctcgaactgctgggctcaagtgatctgcctgcctcagcctcccaaagtgctgggattgcaggtgtgagctaccgcacccggcctggatcttgggttttctaactgggggtctgctttccagctggcagtttctattgtcaggggcctcatgatctgtatctgacacttcctcaccaagcagcgggtggccatggcagaggggctccagaggtatacctcgataagcctgggaagcagaagatcctaaagagggttctctgttctgtgtcgcacaggacaagaaggactcctaccagcctgtgtgcaacatccccatcatcacatccctaaaggaggaggagcggctcatcgaatcctccaccaaggtaccaggacctctgaggggtgcgggccggggatgccagtcccctggcctggcccctcactctgaactccttcacagcccgtggtgaagctgctgtacaacagaagcaacaacaagtattcctacaccaggtagggtgcgtcacagggctcaacagacactgggcagcagacccaaggagtactgcctgtactcccagcacggtcggcgtgggtctgggcctgggtcttggaactggctgtgccaagttggggaaaaacagaaagtagaagggaaattgggacagaggcctttggaactcagcagggtgccctggctgggatataaatgattgaaggtgaaatgcgccctcaacgtgtatcacgaaggcagcatggcaggtgttttcacacgtgtcatcctaccgggtggaggggatgctaggaggccggtgagctgggagtcccccaagccagcctgtgcagttcacactgggccgattccctccccacaccctccaggccatgtcctctccataggccacagttaggtagacgcaggtggctgcaggttcagagtcccaaaccctccctatgattccctgtggccaggcatattgccactgtcacccccacagtaagggaaggaatgcctcccactgacatagcagccttgtctccttccttccagggttagtgaggggagacctccttcctcagctgtccctactttgacttaaaaccaactgagttccttttcctcacaggccccccaacccagagggtaccctatgatcctttctctcctggccccctggcatcttgctttcatttcggcaggacaggatgggggaagggagggaggggagggccccacttgtctagcaccctcccttggactggaacctcactcccagccgcttggccctcatgtttttttcagcaactctgacgaccacctgctgaaaaacatcgagctgtttgacaagctctccctgcgcttcaacggccgcgtgctcttcatcaaggatgtcattggtgacgagatctgctgctggtccttttatggccagggccgtaagctggcagaggtgtgctgtacctccatcgtgtatgccacggagaagaagcagaccaaggtgtgggggattgcccctgcctgggtaggggaggacacacacccactgtgcgggggacgtggtcgggctgtgaccagcacggagcaaaaggggcatggacttggctcttttttccaaacacggtaatggtgctgggcaaggacaaggccagaacaaggggtgtggggaatggacgggaactgctttgttcctgacagcgcagggcaggggccgttgaccaccaggaagtagcctagtacagtgggaaggactgggtctttgaagttggcccaattcaggtttgaacgctggctcacaccacttgccagttttctgactttggataagccacttaagccatctgggcctcaggttcctcatttgcagacatggggatgatagtatgaatttaacgagatatgaaaatgatacaactctttggagcagcagtgtggtgtagaaacagcttgggctttcgtgttagaatgctgttcagatctcctgtctgagccagggacacaggtgggcacagcacttgagcccaggagttcaagaccaccctggacaacatggtgaaaccccgtctttacaaaaaatagaaaaattagccaggcatcgtggcacatgcctgtagtcccaagtactcaggaggctgctgtgggaagatcccttgagcccaggagtttgaggccagcctaagcaaaatagcaagattccacttccaaacacttttaataataataaaataaaatctccttactggccccaaccagctgggggtttctggctaatcaacttagtgccaggtacacaggaggcatttgataggtgacagtcatcacaaactcaggtggcccctctcccccaggctgcagtcagttaccccagagagtagctgcctcctgtgagtgcaggtcctggagatgatacgctggggtggatggcaggtcatccaggaagggccatgtgggtgtgaagagctcaaagtagccagacttgccaagcaacttgtcgacccccaaactactccaggtgcctccagctgggagatctgcagagggtttggggaaggccaacttacaggtggccctgcttccttctgcggtttttggtgtaggggtgggagggagggcgacaggtggttcctgaccctatcggtggtgaaagggttcaggggcaggtctccagtggctggtgatgctgcgacggaagtggcagcgcacctggcatcttcttaagtgtgttgtctttcatgaactcgtgtgacccctcacaacatgcctgtgagacacgcagggctagagccactctccccatgtgacagatgagtgaacagaagctcagtccaacagagcaggtctggctagaattcaggtgcttgactgccttccctttctccttcctccaggcaggtcatgccggtgacacactgcgtcaggcaggcagagaaaggcagcataaccactcagcatagcagctgctctgtgtatgcctctgcttggtggtttgctgtgtgccaatcttctgctaagcaatcacatctttcccgtaatgttgacagcaactctcaggggttgagctgaaccaaccttttgtacatatgggagctgcagcccagaagggttcagcccaaggctccacagctagcaagtggtagagctgtgttgggacctagctctggcccaccctctatgcccactagtcccttggtctcaggctggggcaggggtgtggaggatgttggtcttccctgtcctcatgtctgtagagtacatcccctcaccccgccttcggagggaggctggctttccctggagacggaccgccacctgttttatgagaggtagcggaggccttatggagcctcagggccagccgctctgacgcatggcttcctcttgaagatgaaaccttgctccaccttcttcctccctaaccccaggtggaattcccagaggcccgaatctatgaggagacactcaacgtcctactctatgagactccccgcgtccccgacaactccttgttggaggccacaagccgtagccgcagccaggcttcccccagtgaagatgaggagacctttgaactgcgggaccgtgtccgccgcatccacgtcaagcgctacagcacttacgatgaccggcagctcggccaccagtctacccatcgcgactgaccagaccctcagggagtcagggcacgggaggccctatctcccatcctgtggaacccgccccattggccaccccatgctgctgctgcctgggtctctgctctagcacccagaggcatgacaggccctgctcagaggtcagagggtctgggcagaggagggaccacattcccctgccttgcccctgagcacttctggagactgcgtcctgtcctatctgctcaccatcacccttcctgcccgacggagctgcttctgctccctggggcatatggactgacccacctcctgctgagaaccttcccctaggccctgtgcagaaggctactgccccttaggcctcagctgggggaaaggcagttctggtgctgtagaggccctggtgcagaaagtgggacgtcttttttcctaaggtgtttaagcacaggcttgataagtttggtttttaaaaaataatctaggaaatgaataattctaaatctagtaatgaggaaactgagcatttcttttgccctccagggtgccaagaccctacatatgacagaacccttggcccttctccatgcctgtgggatctgtttctttaaagcactttgtactgttattcaggaggttgataatctccttgacccatgtctttctaccctaatccccacttccctgcagaatcaatctgagggaggggataaagaggaagcaataaaaaaaaaacatccgacagagcagctctggctttgcagcctggccagcagctcagagtgcaccgaggagggaaggatggctaagctgggaccggcagtcctcacagggtgcctgtgagaaaggacattttacccccacatcatagtcacatcactgactcctaggtctagcacgactgctctttgtgattctcttgagtacccttggcttccagccatgctgtcctcacatacggtaaagccaaagagctgtcacatgggccagaaacatgagccacggcaggaagaccgtggagcccgtgggcactgcatggtgttggctggcatgcccatcagctgaggacagcaaactcccagcagcccctacagaggtggcacatgcttggccacacatctactccctgcccacaccatctatgctcttggttggtgctggctgggatggcggttctgcccagtggtgtctctgagcgcgggatgacaggagcaaccgaagcaccctgaaggccttcactccttgttgggtaactcagccatggagatgccaagcactagccaggaggtgagttcctctttagggctttggttttcattcctttttgtttggcttggccaaaccagaattcagcttatctgaattattttccaaaggaatgctgtcagggagggactgttctgccagcctaacaaagcaacgtagccacgtatagtacccactttctgctctttggagagaacacaggttatcaagttcatctctcttgactactcttatgatagctgatgccacagagcctatgggcaaatgccagacccagggttagacacaaggacctgaagtgacatgacggcgggacaggggaaatgtgactttctaattaggcattttatgttagtcacagtcttgaatgtataaacagcactaagactctcaggtcaggtaccttggtgatcagctactagttcttccagccctcattgaggtaacaagataaagacaaatccacttctttggccaaattcaggctttggctttatgactttcccacagagactggaatgcgtcagcctgagaccactggcctattttctcagctgccctcttgaggtcctttaacactcaaattcccagctccccactgaggtgttgtgatgcttgccttttgacctccccatcccctttagtccctgcttactactttgacattcacatcctcagtgtctcagtcttttttgccgagaaagcacagtagtctgggactgggcatttatcttctctgactgaaaatctctccttggtcttaaggaaaatactaacattgaactcactgacatgatcttagcttctttaatcagactttgtgacttaaaagtttgggggttttctttgaaagtttccagccctattcagaaagcaactcttggctgtgtgcatttttcaactccaagcagcccaggggtaagtaaacaaagtatggatgaaggtcagattttcttgtcagtttctgagaaacctggcagcctgctgttaacaacacaggccagtattgggttttattgaatttggtatgtgaccaaggtcggcctaaaggatggcgcaggtcctgggcaggaaagaatttttcctttatcacataactgtaatatttggttgctcagcataagtgatggaagcaaacactaatttctaataaaattgtgttaaactcaatggtacagagccatgtttacagtgagcaggccttgaccagcttgcggccatgggctgagttcctgtgcttctgtttatcatctgaccttgtgttctagccaggtcgtaagcgcgactgtactgttgccctgcaaccccagctccccctggaggactaaggacaagaataacaagggctggaactgtgatttaatattaattcaagaaaactacctctaacaatcactgcagtggcggaggaaaagaaatcctaagaattggggcaagatgcagcacaattcatctctggctcttggaaatctgagagaagctcaggaagtagcttgacttagtcatcaatccatacctaaagctgctcctcagccaaattcctgcatttgtggtctggatgcttggcagagtcatgctgagggctggcacacccattgctccaggaaacccgactggcttgcctccctcctctcctgggcctagcgaggccagaaatggcaatggtcggtcagtgctaagagccaggccactccgaccctgacactggcctccctctctgcatttggcagaaggtaaagtgaacaagagtccagtccagcacccccgccaactagctgagaggcacagtgaccctaggagatgtccagccagcctccaggctgagagggaaacaggcacatgccctaccaggggggcagctccctggaagggcagcaaagaaagcagtcaagggcgcacactgggtcagaaggggagcctgagactctgggagcagaaatggcaagggtggccaagcgtgcactggtttactgatcaaacctcacgtgacaggccaggaaactcctccaggcctgtggcagctgaacacagttccttggtggagaggtttactggaacatggtgtaggcagggcttatgaggaggccagccttggaggtgtcccacatgggtcttctgaagaaaagttataccacccctccccacaaaaagaaccccacaatcaaattaagagacccactgtggcccatgatggggagagaagagttctgcagcaattgtgggatgagagttgttcttcccggtgaccaagcctgggcacttggggcctcagctggcctaccagtgaaggcctgagggtggtgtcttctcatctttattgctttccagggagaagggaggaatccgaacatcaaagtgggagccatcaggtctttcaaagcggaacgtgcccctacagtcagaaagaagctggtttagaaggagccagggctgaggcctcctaaggatctggatggccccatgccctcagctgccagccacagaggacatgtgagcctgagctctcttctatctctagctcatgacaggatgactggtccagagacccaagagcccctcatggttatccatgaaaagaaaaacacagctgcagtggctcacgcctgaaatcccagcattttgggaggctgatgccagcagatcacctgaggtcacctgaggtggggagtttgagaccagcctgaccaacatggagaaaccccgtctccactaaaaatacaaaattagccgggcgtggtggcgcatgcctgtaatcccagctactcgggaggctgaggcaagagaatggcttgaacctgggaggcggaggttgcagtgagccaagattgtgccattgcactccagcctgggcaataagtgaaactccatctcacaaaagaaaaaaggaaaacacagctgtccagattctggcctttagatacatactgcataagctagccaactgcattttcaggtaaaggagtgaaacaccaagggaaaaaacccaactatacaagcaattctgcagcatcaaatcaccagacctctttagcctaagtcctcagtccacaaatcacagggtactgggaaacaggcggtaatagaaaatcagacaagtcccacacaacaatatagcagataaggctccctctaagaatgtaacttggcccagagttaatggcaagctctaagctctcacttttctgacctacagcttctgtttgtggagctgggtggcccctactgctgtgcacactcactcaccacatgtgcccactggaagcctgcagcgagacgtggctgctatactggaacgcaggctgctccttggataacactggttcctgtaaaggtttaggcaaaatgggtcaggccaagccccagggacatgtttcctgcaccccagggttacatgctgactgccagttcatcaagactggatgtcccctacccagccaccaccacagcaggcactcccatagcatgatacacttcctgccagtacctcctcccatagatggccatttggctgggccttttatgctggctctgggaaagataatctcagactgaatgtccgaaggcactgggcaaaggacctcctctgcagcccggggaacacagtgagaccccatctccacaaaaaaaaaaaaaaaaaaaaaaaaaatttaaactaaccaggcatagtggtgtgtgcctgtagtcctgctactcagaaagctgaggcggaggattgcttgagcccagaaaagtaaactatggtcgcaccactgcactccagcctgggtgacacagcgagaccctgtctctaaaaacaaaggacctcctgtggagatatcccctccagtgtccattcacacatgctggcggggaccacggcaggtactctgcaaacctctgctgctttaattctcctaatgatcataagataactggtgtgatccacattttaggagtaaggaactaagattttggttaaataacttgccgaaagttatgctaatatataactcagctggaatttgaagtgactacctaaatccaaagccttgttcttattcacttgcccaactgcctccccagtcctcgctgactttgataaatgcttgttgaatgtggcccctgacaccagtactgcttgtgactttatttctcaggagacagggttgggtaggcagggattataaaatcagatctcttcaaggaccagcagaggatgtaaacatgtaaaggggcaaagaggcaagaccacagggattggtgggggtgtgtgccccacctaacgacattcaaattttagtttttaaaagacactataccagttttaaaaactacacaagttttgacttcagactcacttgggtttaaattgaggccctgccactactagctatgggaccatgggctggttatttaacttctcagtctcactcttttcatctatgaaatgggtttcaagaaacatatctcatgtagttgttttaagatttctaacccaaaacaacacaatgtattcacaaagtgagcctctgtctataacaacaaaggagaaggaagccatgcgctaagcccccaggcttgccacacaggaccagaattactagaccaaggatgctcaccctgcccactacccctcggcctcgcactgtctccaaggtgccagagagactgaatatcctccagtgccgctcccggagctgtaccacatcactgtcaaggttctccaaacggatacagtagcgccactgaggtgggtgtgggagagagagtttaaaaaaaataaaatttgggtaaccctcctcagaattctgtgcaaagcaaaagtcaacaaagctgacacatgcactgcacaggttccgctctcgtcagaaggtgggctcccccacctccaccctgacccccaggcacaccccacaagctccccttctcccagacagtgacactcacccagtacacgtgggaattctgggcttcctagggagaaaacaaaaagaatttaagtcccacagggcaagaccaagtgtgttccaatcaacatctctccagtgcagttgatgtattccaggaaggttgcagacagaccaagctgagagtatctgtgggataagggtgatagctgaaccatggcctacacacccacagggaggcaacatccctgtatccactcctggcctccccactcctcatcccttcaagatcaccaacagagctggatgccaacagaaatcagttacagggctcttacctttttcactgccctcctcaccagccctgccccctatccttgctgccctgagcccctgtcctcctcctgtctcccattactgtcccttgctataatactttaagttggcctcctccactactataaggtcctggaagacagggacggtgtttcatttatatttgtatccaagcatgcactgactatacgtacttttctgacctatagcttctgtctgtggagttgggcggcccctaccactgcacatgcttacagccaggcgatgtgtaagtgtctataatgtgtaaaaagtgttatgcctacactgctttaaataattatgtgtatattcttcataaacatggctccctttgagcaagagggaagagacaggataaaggattccttcctgggacctatgagttttcctgcccgctctaggtcttggtgtcagccactgtctagaggctactcaaccccacccaacacatgccaccacttggaagcagaaccacagggacatggtttatatttagactcccttcccccggcagtcaccttaaggacaccatacaccttggggcctacccctgctagaaggggtccaggctggccacataccctcatgcccatgtagaaggggatgacagtgacacgtatgttctcagttgtttcccgatgaacatcggagagctccagccaggggtgattcttctcttgccaggcccttagcgtctcccgagccacaaaaggaggtgctggggcaagatacaattggttagtccaattgtgtgttgtggatacaattgtatctagtccaatcacacaatagtccagtgcgattgcccctcctagaaaaccctccctagtggtggcccaggcaaacaaggtgctcatacatgaagcaaaagttcaggctggaagaaggcacaggactgctaccaagaataagccctgaggagctagtgtgatacaatgggaaaacaatcggactggcagttaagagccctggttttcagccctcactctgctactagcaaccttgagtcccttgtcatcatccctgatcctcagtttccatatctgtaaggaaataactgccatctgtcatctgtcaggtatgacacctatgaggcatgacagctctaacaggaggttgaaaagggttgtggaaatagagcgttggaattatttcttttttttttttttttttggagacggagtcttgatctgttgccgggatggagtgcggtggcatgatctcagctcactacaacctgtgcctcccgggttcaagcaattcttcagcctcagcctcccaagtagctgagactacaggtgcacgccaccacacccagctaatttttatatttttagtagaaacagggtttcaccacattggccacgatggtcttgatctcttgacctagtgatctgcccgtgtcagcctcccaaagtgctggagttataggcgtgagccacaagcacccgggcctttttttttttttttcctgagatggagtctcgctctgttgcccaggctggaatgcaatggtgcaatctcggctcactgcaacctccaccctcctgggttcaagtgattctcctgcctcagcctcccaggtagctgggattacaggcgcccaccaccacgcccagctaatttttgtatttttagtagagacagggtttcaccaggttggccaggccagtcttgaactcctgacctcagatgatccacctgcctgggcctcccaaagtgctgggattacaggcgtgagccaccgtgcccggccctggaattatttctatgatattctttgatgaaaaggccctcccattccacctccccttcttgagagagattaccttttgtctggtcatacagaagaaatctttcaaagagttcatgttggatgggaacctgatcagtggaggtgtaggggaggatgtcttcatggctgacatagtccaagcctggcacagagatgcaaaagacagtggtgaaactcacaggagaggagagagatggggttgagaagaaacattaactggccttgttccagtatgggataaccctgatatcatacctctcagcatcataatccctcccagtggatgacaggacatcagaatcctctccctgagacacaccagactccttcttgacgggcaccattcaaatgctaactactcacctgggatggcatagagggcccgactgtcatcatggttagccaagaaggtcacagcttctgtctgagatctctgagactaaggcaagaagtgaatcagtggtgaaaccatgtctctgctaaaaagtacaaaaattaggctggtgtggtggcagatgcctgtaatcccagctactcgggtggctgaggcaggagaatcacttgaacccgggaggcagaggttgcagtgagctgagatctcaccactgcactccagcctggcgacagagtgagactccatatcaaaaaaaaaaaaaaagacgtgaatcagggctttgttggccactgtgcagtccaaggccttggggaccaagactgacctgggctctgtttgacccccttccctccctttgtccccattgggatgcaggactttccatggagaggacccccaagcccagccatcttgcttacttactatatgtgggcagtcacgagcatcaatcagcacctgatagtaagtgtgagttttgcctttcacctccttggagccatggccagcagggttctctgctctatggggtgggagaaggaggccaagatcaccccaggagaaatggaagctgtggctgactcagctccctactcctcctcacctaaacaggctggtctctgatctaaaggggctttagcaccagctggacacctgctctgcagcacctcagctcagctgctcctcagttggggcaaataatagagcatggaagaccatggtatggagccatcatctgaccgtgtggatacctcttaaaagaagggggccatgttgagaaaatcaaattgccacctcagtccccagggcccagagtactcttgtcttcttatatcccagggactgtctgtgatcacttaatggggctgaaccttttctgttttaatgtattctagggatgatgtgagattgagggaaagactccagctgaacatcaagaaatcaagaagacttgtcccccaaatgccctctgggatactcataatgaaaattaggaatggcttaggaaagcattctgaggaggcctaaagggactctctgacttagactatccctggcactcagcacttttgtctccatgggtcttagtcccagagaagtactctggggatgtttccaaggcctaggaggacgctgtcttcacccctagtaccccaattacatatgtctgccatctcctcctgaggatactgtgaggcacaaccacagggaaacttacttttctggagctgcagaagccacatcccggtcatacagtctggcctgccagggaaacaggacgacacctcggtagccaaaaatgctatgaaggaaaagctggaaggaaagaggggcctcagtgagtctgcagtccagcaaatccatccaggtgggccccagaccacaaagcaacacaggtggaggcaactccagcacaaggtcttgctacctcttcccttgaagtctgtgatcaaccagaccaatgctggaacactcttatttcttctttacctggctgactctactcatcctttaggtaaaagcttaggcctccaggaagccttccctgacctcccttccacttagcacaatgtacagctattggccatttgcaaatcgttcttttctagactagaaactccacaatagcaggaatcatgtctactttgctttctgatttaaccctaatgcacaatgcctagtccattgtaggcacacagaaaaataaaatgttgaacaaacaaaaagtcttccttacctacaatatcctagaagggcctaaatctatcccagtggacccagaacaaagctgatatagaaaaagaaccacacatccagagtttaccacactgaagtcaattttattacggcaaagcatcaaaggtatacttttctgaaagctccctccacggcttcccaccatccactatgttagagaaatcttcagcaacttggctaaacctcactatagtccacaccatccctgtccacattaacttggaaagagaacccactgacacattaagtgcattcaaatccaggagaacagaaaccctatctataaaaatttgattctgggctgggtgcggtggctcacgccagtaatcccaggactttgggaggccaaggcaggtggatcacctgaggtcgggagctcgagaccagcctgaccaacatggagaaaccgcatctccactaaaagtacaaaattagccaagtgtggtggcgcatgcttgtaatcccagctactagggaggctgaggtaggagaactgcttaaacccaggaggtggagcttgcagtgagccgagaccatgccattgcactccagcctgggcaacaagactgaaactccgtctcacaaaaaataaataaataaaataaataaataaaataaaaaatgaatacaaatttgattctggaatggcaccaaacatcaaggtggaatgaatggaacaccataccatgcaggcctgtgacctaatctgacttttttcagaagcagagcactctatgaaaatgaaagatgacccagcccaatactcacctgcccggtctcatattttccattctgttttggcacctcaaacacaccaactgtctccaacactttgccctctggtcggtttctgagtaggaaggaaaagaacaagcaacagaaaagctgagaaggtaatggtagttatccataagaaaaagctcctaggatactgaggggccagggcgatgacagcagagaagggtttggggtagtgggaccagctggagcaggaaaggctttcctcctccttggtgaaaacctccacagtctcccagtgttagatgtgaccgctcccatactactgtcttctctcttcactgggcattcttcatatcatgccctcacactctgctcaaatgtacccctgcccttgtttcttccctaacccaccctcctgacctcccacagcactttaactgtcttgctcactttttcaatttttttagaaggggagtatctttttttcttcttttcttacattttctatatcacaagtcatcaaacaatatcctgctccctttacatttcagttgtgtccatgtcttatctttattaaatactgtaaattccctgggagcaatgcctgagtctgattagctggtactgccccctcagagcctagtgtacaagaggtgctcaaaaaatatttgtcctgtattataattccatgtccatctccccctctaacctgtagcccttacattgcccttgaaaagcttaaacatctctagatttcctacggcacatcgctctctcaataccgtttttgttcatattctcacaggggtcttaaattgcaaatagctatcatctctccccaatgttcagtgtctaatatcagccactaaaatgtcagtcaccactctgaacagggctgctctttctaggggcccttcaaataaaggctgtttttactgttttgaagatgtgaactttatgcttcctcccactgatccaccagcccatttgatccgcctgtcccatccgtggaaacagtttccacaccatccccatggcctcaaacccccttccccaagtcacagatagaaaatcgatctccccaaagtcacttggaaacctggggcctacgagggtccacacccaagagtctcgtttcccacctctagcatctttctgaggcagaccttcaccaaatccaaaggctgagggttcaagccaatgccctagggctgaattaaaaagcttccctctgacatcggtgctggggaccccagccggggaagtaggattcacttggggagggtaacctgttcccccccagggccagccctgtacaaccagggctctgggccgcgctggcttccctgctcctggcacatgtcccagacagcgcaggtcggctccctgctcgggaccctctcccgggtcaaactccagtcaccctcagcaggcccgggcccctggcctccgcactggctaggaacacgctctctgggctccaggcccagttcctcgcgccccctggctccgtccctcaccgggacgagaggtgcctccgcgtcgtcgtggtcgacgctggcgagaaggctccagctccggccgccgcacagagcggctttgccaccgggccccagtcagcgaccgggaccaccagcggctgcccacggccaggggccgccgggctgtacaggctgccatgtcccgcccgagcgcccgcccggctgctgacacagagcccgacccgcggccgggcggttccgccccagtcccacactgccccgcgcggcgtcccggccctcttggcccgcctggtcccaccc

SEQ ID NO: 12830 - DNA, 1094 bp, Homo sapiens
ctgcctgggcgacagaccctgtctccaaaaaaaaaaaaaaaggaaaattcagcttcctcggctcaagggcctatctaggcctggtgagaaggtgaagaagagtggtcactggcctagagcacacatgagtttttgtcccttggctttgctgcaagtctttttggaaagagacaagcatggcccagcccagaagttctagaagtccttggcctcatcttgcctcaagggcattgcttagagatttccagaatgtcattacttaatggaaaatttatagggtctgcttccttttgggacagcttggctctgcaccctggccgcctgtgtccttgtggctgggctgctcctgcccctgcctgccatcacttacctggcgtgtgcttggtgcgcagcatcagctatatgtttctggagctgctttctaggagaaatctaatcatagaaaccaaactgaatggcattccttggcctcactctttgtaccctccatcttgggatccaggcttccacagtgcctttaggcctcccctccccttgaccccatcacacttgtccccattggtcactttggacttgctggtcctgctgcatggaagccctctccagcctactccacatgtgagtggggtttaaaccccactgacttgtttccttgtctgtgatgctgtccttctaccaatacttgtgtccagtcacttggtgtgtcctgtaatctatctgtgtctggaccaagactggtacactggacccaaggttcccagcaagctgatatgtggcttgtgtcatttgtccctgtgtcttctcctatctcactggcctcctatctccacagcctagtccatggagttgctttatgtagcaaattctccgtttggagcttttaaaataggattatttgccagaactgcatttacaaaaaaagtttgtgtaatcctggtttaaataaattacacaaagtaattcactggcagctagggtgcctagtgtgtgctaggcataaagctgcttctgaacccactaaaagttcatcccagaatgatatctccactgagttcttaggtttattactagagatgaaaaaaaaaaaaaaaaaa

SEQ ID NO: 12831 - DNA, 1094 bp, Homo sapiens; identical to SEQ ID NO: 12830

SEQ ID NO: 12832 - DNA, 9716 bp, Homo sapiens
agagtgcctggtgaagaatgtgatgggatcactagcatgtctgcggagagcggccctgggacgagattgagaaatctgccagtaatgggggatggactagaaacttcccaaatgtctacaacacaggcccaggcccaaccccagccagccaacgcagccagcaccaaccccccgcccccagagacctccaaccctaacaagcccaagaggcagaccaaccaactgcaatacctgctcagagtggtgctcaagacactatggaaacaccagtttgcatggcctttccagcagcctgtggatgccgtcaagctgaacctccctgtgagtagtgtgggcagggcccagggtggccgtcctggaggtcgtctcctgcatgtctcctggtcagggcagttcctggggggagggtaggagatgcatttggaatcatggtgagagctgcagggcccttgagtgagtggtttcagcagttctgatcagttgaaatcagggagaaagaatgagctaattggcttaacaataactggtttcttagatattggaatcctggggaaaattgtgtagaggttgaagcagtgggagaaaggaaggcccacagatctacttccagttccatggtgagttgaagtcagagcacttggccatcctagccccttcatttctcaggtgtggacatagttgatcaaggataagtagacgtagttgatcaaactatgctagaggggaattggcttgctgcagtagtggtcacctagcatcatcgtcactgtcacccggagcacacggtggggaaagatagtgggattacctcgcagggagtgcaagtacatggaggcgtccccagttggagaaaggtggctgtggctgcagctgcacaggtggtgttgccctccctccctctggctacagcacacttgctcttgtgcttttgtgagcccgcccctcttctctttccctggagagttttccatatgcccatgtccctagcaaactgttctgcaagcaaacctgtatctccagctgaacctcagggagcagatggaataaatgcttcagtttttttttctttaaagcaccaaagactaattgtctttaaattgtcctttgctgtttgccaagtcctgtacaccccctggcaagtgcattaggtggttgcagccactgacccagactggtgtgtgcacaccagagccactggtgtgtgcacaccagagccactggtgtgtaggagcggccttagcctctgccaggcatccttactcccaagtttaaagtcattgtgtctgtaagaactgtctggtgctattgcttcactgaatacgtgtcaagcactcgggggaagataatcagaacagggcagtacgtgtctgggtcttgaaatggctcaggaaaggtatggaggcagaagaggcgccacgctctccattgaccaagatgaggagtggaggcagtcagctgtgttggcctgcgggagggagactgttgggggagctcactgcaccaatctctagctgggctggacagggtccatagttgagagtgaaattctcagagcagatgcacagaaccaggagagaaggaactggggactggagtggaacccagagcgttgtgaggcccttaggggttggagggaaggcagaaggcctacagaagagagcatttccccagattccaacatcagaagctacagggaggtcaaagagatgaggattccgacctgatcatcctgttgacctttaggagggcattggtgaccttaggaagacgtgacacagaagtagaaaccagattgcgacggtgtgaatgagaaggtgaggatgtgaagccaccatttcaagaagcttggctttgaagggaaacgcatcagtgccagaatagcagaggggtcagcttgttacaagaaaacgcagtgggaactgaagcagggagggctgagaaggtgaagacaggagaaggaagggctgggggacttgagattgccgagaagcagcagcatcccagttgaggttgagggaacagtgctggccagcgggacagacaagtatgggtgattggttaggccatggggtttgggagttcaaggtcagtctctgaagtgcaggctggagagtggccaggacgttcttggtccaggcagagtgtgaatctacctgtccctatgactgttgacgtcgccctcattagctctgacataagaagaagggactgatccatggtggccctgatctgatgtcttcagagatgggagagtgaggagctgaggaaggagcttgctgagtgagagtggtctcagggcatttggtgggggctgagccaaaggggatgcttgatcaggagcatcatcatgctaaatctgtattctggggacttccttcttcaggagatgttaataaggccaccctaaaaagtattccttgtctgttttctgatgccttctaggtcttcacccgcattttgatctcctatcatggccccaaaccgtactatccaggctggcagttcctcttcccccaccgttctctctgccttcaccccaattcctcttcactattctgttggccattgagacatgtgacacactgtggccaattcagtggcctttggccatagaataaaatttaaatttccactgggatagatctattcagacttggttctcttgggaaaggaggtcagagcatagaaagtggcaccgatagtctgcttccagtctcccctcttgaccacttgcctaaggtgcctgggtgtgcacttgtagccctcacccccagggcagttccatgagctgtgccaaaaccttacatgtaagcaggtggcccttgactctttctcgtggatgtcagaacatctcaaaaaccccacacccataccctgtgctggcctttccaacgctgtccactaccatcccgagcagggcctcagtgcttgctgttagtatacctgctctcttctccctgcaacagcctctccacctgcagcctgtgcctctaccgtgggactccacttggatttggttctgatacaccacttgaacttaattacaggagcacctgtcctcagtcagagtgatgactcagaaagtttggctatcggtgggtcaggccaacagcctgagctggtctagtcattggggacttgctgtctgggtgcagccccctgcctggccctctgtgatcctcacacctggaaacccaggcactgcttgatctgtccgcacattccttctgtggttgtttttaaaaatgaacttagttttagaataggtttagatttagagaagaagttgtgagaataacgtggtttgatttcgggcactttaagacgtttacatctgttatctggctccttctgtttggcacttagtaagatctgaaagtttgagggttgggatggtggattttttatttttatttttttaaactaaggattgtgaaggctgtccagatttgtcatttggcagttaacctggtcagtcagcagtatctggatactaaagaatccttagtggtagactgtgtgcaaatgaaagaaacgttaagtccagtgaatttgactaggggtggaaacttatgctccgcagctcttcatggtgacaaggaggcaggagtgccagggtcaagggttacaagtggactccagcattggcgccaggggaatttgcattttatggacatgtaaaatttcaaatgggacaagtaggacctgccatgggttgtcttactaggtgaggattgctttttaaaaggctgcctggtttcccccttatttattaaaagtgaaagaatattttagtatccataaaaagaaaaaatgtgcatttcaatgaaggcagcctatttcaagatagagtggttggaaacttgtacgtttccctctgaattactccccagcatccaggaacccttccccgctccactttattttggtgttccccctcaagatcacttgctgatgccagtaggagctgtggctcccgtggatttacctgtggagcagccaggggtgaggtccccaggccagcctggccagcccagcgtttgtgctgcctggctgcctaggtgacactggacttttgctctctgctctccaggattactataagatcattaaaacgcctatggatatgggaacaataaagaagcgcttggaaaacaactattactggaatgctcaggaatgtatccaggacttcaacactatgtttacaaattgttacatctacaacaaggtgagatgtaggggtgggtgtccagctgccctggggagagaggaggggaggcgacggcagtgggcatgtcaggagcccgtgggcaggggtgttgggtgtggctgggcttggagtctggcaagaggagacccttggaggtagaggtaatgagacctgtggttgttcctgtgactgggtgtgggcttttttgctgggaggagggtgctggccatgttgaacttgcaagctgtccttgttagcctgaagcatgtgcttctggtgcccttgggattttggttcctgagcatgtctagtagagaaggtgtgaggagaatagtggcgactcatgacaaagtccatttgggtgatgtaaattgttaggaaagagcctgctaaaatgtagttgtgcagaggtgtgcccaaacagagacctccacgtgagagagggtgtgatggggccggcgcagagctcagttgctctgtgggtgatggtctgctggaactgtggacatgactgtcaataactcttggccatagatgaagtgtccccccgatcctacatgtagacctgaaggtcacttcctaaccccgtagccaaacctttcggctcggctgtgccatgaagccagatcatttgtttacagttcagaccacagatgtgattaaaatcaaccctttcaaatagaacgactctggagggagacactatacagaactcagcttttgacctctgctggtgtagtgggtaaaaatgcccagaagagatgggtaggtgagtttcttgaagtttactgtgttttttaaagtctcagctctcaccacttaggtttgagcaaaatgtgcagaccaggctctcagtttagaactgagtgggaacagcatgttatagatgaggtgacagagtgggacccctcaactagtgtgagatgtgcagtgcccagagtcctggtgagctgccatgggggtacgttggggagcattgctggggccctgctaatgtatcatggcaagaaatcctgtgtcattcacgtatttctggtgaaattgaattgtgtcaaaggagggcccctttcagtgattggctgagcttggtagatgcttaaggcattaggatggcttctcagataggccagagcttaaaagatgagggaggtgcaggtagacaagtgtaggctcagcacacctgtgggaacacaagcctctgtgatacctggtagtgtagccattgtggctcctttgggtgcagatcggggaaggacccggaatacgacgcttcatgttttgggggcagggggtgggtggcatggggtgccctgtctacagaggtggggaggggagggccctctgactctacccctgtgtctccttatccagcctggagatgacatagtcttaatggcagaagctctggaaaagctcttcttgcaaaaaataaatgagctacccacagaagaaaccgagatcatgatagtccaggcaaaaggaagaggacgtgggaggaaagaaacaggtagagtactgaaatagcaagtaaattggctttctccccgacctttgtcccttttccaagtttggtggggggctgggagtggcaggaggatgtgacattatatactgcatgccgtgttggtgtttggacatgtgagattgggtttggtgttggatccatcccatagggtcatgtggccctgtggcctcttctaagcagaaataattgggccctgccttttctgagggtaggtgatggacttagggtaaaaggaaagtgtaacttctcaaagcactttgacgtttgttgaacacttcaccctgccagtatcataggtggtttttacttttccattttaaggacattaacatgaccagaaatcattttaactaacatctcagttctaaactttgaggtttgtgattggaattaccttaatgcactggtgtcagagttatccctgcttctgatgctcagtcatctgaagtgaaagccctcctcatccatctctgcctgtcaccacccccaactgacacagggttccaggggccagctggcagagctgcccactctaggaaatgattctgtctaggaaactctccagcagctactggctacatcttgtcctttgcaactccatgctgcagaagggtgacatttgcgaggtggtccctgagtgtgagttgtttgcttctctgagcagcagcctttcacctggcctcccatgctgttctgaagtggtggcagaaagggggttgctacatcccctgctgcacccaaaggtaaccaaggagaactagtctcacgtgtcaccctgtggctcttgtacctatcagatcacattcctgatcctcatgtaagtcacatcccttatccttacatgaggatattggtcctcactccctgggaccaggggtttgggctgcacgctgggcagacagacgtggtggcatctcctattccagtctgggagaagcccaggagttgtgcctgaggaaggagaattgggaaactcagcagaatctcacccttgctccttgagatgcacagggaacatgggtgctgcttgagctgatagatgaaggcactgggtgtctttgtccattttcatggcagccagcatgcacacgaaggatgtggtgacccaggttatgctcctagacattctcaccctggtccacccagttttgttagagctctggccataacccctcactttttgcagctggttgggtgtgccacgtgaccattgtgtgttcggactgcctgcacagctgctgggaggcagcgctcgagccagtcatgaagggcagcagtccagctgccccctgtggttccaggaggtgggggcctgccagtttccagaaaccttggcaagggcggctactgccggctccctgccagaagctcttactcagaaggcagtgcttctgggaacaagggcagctgtgcctggaagctctgaggagtgttttcccgctctctgtcccctgtcagcatgtgcttcctgctccttgagcctgggcctccaggcttcatgaaggggtctttgtgcctgagttgggagttgcagccaggacgccctaggaaatgggaagtgcggttttctgctgttctttgagccccagggacaggtggaagggtttggcagagtggagtctgggatgttcgtctctcaggcaaatgcaacacgcgaatgtgcgttcactgtgtgtggtgtatgtccccacgaggtcagccagcatgtggatgtcagcatggtctctaactcgccgtcttattatgatttgtagggacagcaaaacctggcgtttccacggtaccaaacacaactcaagcatcgactcctccgcagacccagacccctcagccgaatcctcctcctgtgcaggccacgcctcaccccttccctgccgtcaccccggacctcatcgtccagacccctgtcatgacagtggtgcctccccagccactgcagacgcccccgccagtgcccccccagccacaacccccacccgctccagctccccagcccgtacagagccacccacccatcatcgcggccaccccacagcctgtgaaggtgagtctcctggactctggagggctgcttcaccagggaggagagcggccctgtccttgcccgtgctttacacagagcctgtcctgggtcccgggcactggtgggtgtttctggggagatcttgctgtgttgaaattgcagcccagaaacagccgccccactgactcaaaggtcccataattgtgtcacacctcctagtgggttcctgccccctgcacctcttttatttagactgtgcatatttgcagatgggccatctaaatagtctctgaattgtgcctcccctgggcacttggggagaggccctggtgttaggtactaagcagcctccagaggtcccttggcttccaagtgagcacacagttttatgctttctcctgccacaggcaggtcctgtcccagctgcagagcagagtggtgggacacgatctgcctgtccttggccctttgcctgtgcaattatctttgggtccattctgtgtgagcgatgggccccaagacagggcctggctttgggggtgaccctgagggcagctgtgccggctgccacttctgactgtgcctgttggcgtccgtgttcttggcagacaaagaagggagtgaagaggaaagcagacaccaccacccccaccaccattgaccccattcacgagccaccctcgctgcccccggagcccaagaccaccaagctgggccagcggcgggagagcagccggcctgtgaaacctccaaagaaggacgtgcccgactctcagcagcacccagcaccagagaagagcagcaaggtctcggagcagctcaagtgctgcagcggcatcctcaaggagatgtttgccaagaagcacgccgcctacgcctggcccttctacaagcctgtggacgtggaggcactgggcctacacgactactgtgacatcatcaagcaccccatggacatgagcacaatcaaggttagcgggatgtgcctgagggaagggacaaggtgggcaggctgtccctccacatcagaaccttcctagaccttttagtccaagaggaagcccaggccctggaacggtggctgcgtggatttttcccgccaactcgaagaaactcagcgccccctgctgtctgctgtgggacgtgctctgagacctggtgcttggccattgtggctacagatgcctgtgctgccccttcccctagtctgaggaaaagcaagacaagccctctggccttgggggcccagtgccccaggtaccttgcccacacagtagatgctccatgggagttggggcttggcggccttgccagcctctttgtggtggagaaggccttgctgtctcctctgtgttggaggcacgctgtaagtgccgacattttcaccatagtgttttgaggcttttttagttttaagacttgttacgtgtttcttcttctgggagtggagtcccaagcatggggcaggcagagcagggaacagtgctgtgtccctttgaccagctcctgtactgtgtcatcacgatgagctgggcccagccctctccatcagttctccccgtcatttctggctcaggctccgcctcctgtgggttctgagtccacctgcctgcgagccaggcaggtgagctgggatgttggcagggccagtcccagccctgaggctgagaactggggtgatggcctgtccccccactagagtcttgaccaaactgagagccaagaaaccaacttgctcttctaggcatccctttcgtctgctgccagccacttctccatggtcacatgggcagacacagctaacagggacttgtcttgttttccagtctaaactggaggcccgtgagtaccgtgatgctcaggagtttggtgctgacgtccgattgatgttctccaactgctataagtacaaccctcctgaccatgaggtggtggccatggcccgcaagctccag

SEQ ID NO: 12833 - DNA, 269 bp, Homo sapiens
tgggtctcacataggacttctcactgtacctctctttcttgccccataacagactagaagtggttggttttcctcatgtttcttgtcattgcagtaagagtgggctcttgaagtttcccaagggtcttactttcctgtagtcatgggaaggctgtgggcatagcagtaggtcagtgtggtcccttgaggtgcaggtgctgcacaggcccagagtgggtgcaggagtcccaggtatcttatggtgatctcccttgtggggccatggatat

SEQ ID NO: 12834 - DNA, 269 bp, Homo sapiens; identical to SEQ ID NO: 12833

SEQ ID NO: 12835 - DNA, 532 bp, Homo sapiens
ttccatatgcccatgtccctagcaaactgttctgcaagcaaacctgtatctccagctgaacctcagggagcagatggaataaatgcttcagtttttttttctttaaagcaccaaagactaattgtctttaaattgtcctttgctgtttgccaagtcctgtacaccccctggcaagtgcattaggtggttgcagccactgacccagactggtgtgtgcacaccagagccactggtgtgtgcacaccagagccactggtgtgtaggagcggccttagcctctgccaggcatccttactcccaagtttaaagtcattgtgtctgtaagaactgtctggtgctattgcttcactgaatacgtgtcaagcactcgggggaagataatcagaacagggcagtacgtgtctgggtcttgaaatggctcaggaaaggtatggaggcagaagaggcgccacgctctccattgaccaagatgaggagtggaggcagtcagctgtgttggcctgcgggagggagactgttgggggagctcact

SEQ ID NO: 12836 - DNA, 14333 bp, Homo sapiens
  SITE (4792): n equals a,t,g, or c
agcaggttcacaactacatgatgccacccctcgaccgaagctggagggactacgtcccggatcagccacacccggaaatcccgtaccaatgtcccatgacgtttggaccccgcggccaccactggcaaggcccagcttgtgaaaatggtaaggaggataccagtgcaggaaatagaagagctaactgctaatgtggccatgggccatggcgaatcctggtctgtcctgggcagcaccaaagctctttccccttcttagaggctgcgtgtgcagctcggggagaggggggttttctcactcctgtgggatggtggcatcccacagccaagtttactctcaggatccatgctaggcactgcccttcgtgggatcctatttagacaccacagagatcactccaggcagtggaaaacagccccccactttttatatagagaggagattgtggaagctcataaataataagtagggatgctgggagattattgagctggtatatttctctcgaatagtggtgtgttcattgttgctattgttggaattagaggtgatactaaaaaaggaacggaaaaataccatggcaaacacataaaacgtctctacaggtgcctacctaccactgggtcccagaaagacttgctgattgtggattagatgtggtcccctgccctcgggagttccccagacatcaaaatgagctccctcagcagaagctctcattagctgggtgcagggagaatctagcaatgcggtaactcaggccttcaggacttttgagttagttacttaaatggaagtcctgagacaggtcaacacactgaaccctttggatgttttaggaatatttgttcctttgcaatttggcctttttttccccagtcatgttcaggttatccttggctgcaggtagtgaagaggtgtaccactctttaatgtttgtactgagtggcatgttcacaaaaaagctcagaattcagttgcattggcttttcaagagggatttgcagcaagggctggtttccaatatggtagtggaggaattggctaacataaaactagctcctgaaattcagacttgcgtttactgctctggctctatggaattagtaaccatgggaaagaggcaatgcttagaattgtgtaaagtgatggagtaggtagagacctgtcttgaagcatcggtaacagtaaatgaagcagcagcaagatcaggtgttctgtgccacattctttttccattcatgtttcatacaacattgtcttcaggaacatggttcagtgttctcccaacccacaagagacaagcaaaataaaaatggactaaataatttgctagtttttaattgggctctttggcacagactcaagtagacctgaactctcagctctgttgtgaacccgctttgtgaacaaggacaaagcatgtcatctgtctctgagcctcagtctccctgttagtcagttacagagagagcgctccaagtttccttccaaagctgtgcactggctcgtttctccatcagctttggttttccagttggtctccagctcatctttgcctcacaagagcgtgccctgctagttgctggtgctgggagtgggtgggaaggtgattgggcgccagccccttccttcccaggcttcacacacacaccccaggaagccccgcagtgcgtcggactctctgtctagacatcatctgatttttatttgcaaatgcaggttgccaggtgacaggaaccttttatgcttgtgccccacctgagtcccaggctcccggagtccccacagagccaagcataaggtctgccgaagccttggcgttctcaggtgagtgcagggtttgctcctggaggcaccgcaggaggccagcctctgctgccagctctgtcatctttgggcagattcgatgggactttagacacttgctttgctccctctggggtctggagtagatgtagacacatcctgtgtgtgaggtgaccagggtgatttaggagcaccattagaaaacctgacatcactgcttgtggttctgctgaccgtttcagccactggcttgaatggagtcattttggcttcttcactggcacctctctgaatttctaggaatgtgcctttacctttaccgagggcccctcttcagccaacattctcacgatgtggaataattgcttggaagtgtagaagggcttctcattttgagaagctgatcatccttccaggttgagccacaaataagtcctcctcctctactccctggggacattagttctggtccctcatctctaaaacattgatgtgcctaagagtaatacacattttggtcttcctctgaactttaatatagcttgcaaacaaatatggattcaatctgatttttaaagttttatttctaaaaaaaaaaaaaaaaatccctgcaccatggagatcttacctactataaagaaggcacctctaggcttggcaagcacacgtgctatatgtatatttatttttcagataatattttggattgtttttaaatgggatttgtttttatattaaaaccaaatagcttaaggtttggaattctcatcttgccctctggcatctttaaaaatcagtgatgaaaaatactaactaaattctgaaggtttcagggaggcgagagttgtggcacttttgctgctcagaggggagctggagtttgacctaccagctctttctagttgtgaatgaggcttgcacctttttttctgaggtgctcgtgagtaactgaggatgccctttgggaggaggtgcttctgagcaggaaggcttgtgtttgtttttagaaactttcaaacccttgtcttgaacacctaagacttgtgtgggtgcctgaagagtaggaaataaacagctatttatatctcggcaacctcgtgatttctgatgacattaaatgaaatgaaacctgccccgagaatcacctcgaatggccaacacccactctctttggggcgcactgtctgactcgctttcagacagtgtgttgaagcagagaattgagacagtgatgtgggttaagtctcaaaacctgctgttgaggaataagatagttttgtgggtttctttttttggtatgcatgatacagattaattatcagccatgagcacatttattagataactgtgattcccattgattttggggttccatacagttaccagtggcagctgcctcctgtctgtgccactcccctgcggtctggctgaggagcttgtgcaaacccagcttggttctttcaactcatgggcgatattttaaagaggcttctgaaatcagcaaaacgtttgtaaatggattcatcttgtttaaagtttcagagagcgcagttttagagttcttttcaaacttaaacacaaagcccagtgggaatttcagcagactttacatgaacttttagagtatttttctcattaatttctttcttttcacaagaattaattttgtgataaaaacaccacatatccagtgtggaaaactaatttaaaaatcagaaaaacaaaaatggaaaataaaaacatcacattctaccacccagaaatcaccattaaggcctcagtgcttaccctttaatgtgtgtatgtgagtgtgtttatatataaattatatagacataaataattaagcacctaattctatatataatttatatatgtacacacacacacacacacacacacatttgctttttacctaaatgatgtcatgttattattttggggacgtttcaggtatgtggaccgacttgcttctttctgaaacaccgttatattttttgctagtataaattaaacttagggttcatttcctccaaagtaaaaattgatttgcttaaagatgaattttcattcagtgacacatgacttaaatgacatcaccactatcatcatcataattcacaaataagacttagcaagttcttaatagtgatgctctataataggaattcaacttacatttccagaaaattaatgaaagatacacttgttccttaaaaaaagagtcggtggccacatacgtttgtaatatgctggtttagacagattaaatgggtttctttccacgggacttctccaagtgttgaccgagctcatgctgtctgtggatctctgggggagacaagggcacgctgtgtttcccaggcctccttgacgcgggaaccttttgttcccccacgggacatgtgggacactagagttccaccacaggtgcttggctctgtggagtcgttggcctcgaggtggtgtccttggcccccagcactgactccggagctctgtgtttgcagactgccggctgcacatctgcctgtactaccgggaaatcctcgtgaaggagctgaccacgtccagccccgagggctgccggatctcccatggacatacgtatgacgccagcaacctggaccaggtcctgttcccctacccagaggacaatggccagaggaaaaacattgagaagctgctgagccacctggagaggggcgtggtcctctggatggccccgacgggctctatgcgaaaagactgtgccagagcaggatctactgggacgggcccctggcgctgtgcaacgaccggcccaacaaactggagagagaccagacctgcaagctctttgacacacagcagttcttgtcaggtaaggcacctcgttatctgttagaatggaggtggtgatggcctgcctgccacaggggtcagaaaccacagggtccctcccaccccaggctgaggtcttcctcctgttgacttcggcgcncactgggcttggggcttgactccagtagagatcttctgtctggctctgttgtgggcagagagtccggatcagatggtccaggtggaccatggctcaggctgttctcttgcaattctggttttcagcagtcgcctcttaaaacagttccatttcattgcactatgatctcgacaaatacgtctgctgatgtggcggctcttttcaggttcccagaaaaatcataaaggttggaagcatattgttaacattcttggttgtcaggtgtgtcaccctcatgcagatgctggcccacgagtgagacggagggtggagtggactgtactggttttgcacaggagaagttataggagagtgctataagttggctctgtgatatgaacatttctaagcatatttttcagaaccagtgagttttgtttttctaccttggatttcatgacaattcagcgaacctctggctggcttctgtgaagccctcgccctgtcatgctgggcttcctcactggctttgtggggctgtccaggtggagggagcctcccgcgtgggagggagctgctctacccgccactcgccaccccaccgccaactcttcctctgccttttcccagtcctgtcccttcctgagccccttcagaaactcctgtgtctttgatttctcatgtgcctccccttttcttgaatgtgcttcttcattcaacttatttaaaataaaaatatgacacgtctgtgtgctctggcactgttgacatgtgctcgtacttctgggtgtaagtgacccaagtttttgtaagctcatccagattttcttttggtgcccaaagcaaatatgtccccagataactaagcttcaggccaggtgtggtggcccatgcctgtaatcccagcactttaggaggctgaggtgggcagatcacttgaggccaggagttcaagaccagcctggccaacatggcaaaaccccgtctctactaaagatacaaaaattagctgggcgtgatggtgggcgcctgtaatcccagctactcaggaggatgaggcacaagaatcgcttgaacctgtgggaggcggaggttgcagtgagctgagatcgcaccacggtgctgcagtttgcaggacagagcgagactccattgccccccgcaccacaaaaaaataactaagctcacacagaggctgaccataggaagagggagaactgtgctggttccccgaggcggcggcaagtgaggaagtcacctggggctggacacctctcattctaagggcagaaccatccccaagccctggccagggcggtcccatccttcttggggttgggcatggtgttcatgggggaccaaggaaattgaagggcaactggggggaccccccctcccctgtcagcatctcctgtgtctgccttgggatctggaagagctcacatgggccaggaaggctaaggccactgggcctggatttctgaagactctggaccttggtgccagtggattcagaagataccacaaggtgagggctttctaatgaaagtgtcacaaggaactggcactggcttttctgagtgcctcttgctgggcgtttttagggaggtagagcccccgtggtgactaagctggaaggtgcacattgagtcacaggtgcactgcgtgagagacagcacaggcagggggtggacgcctgtgagtgtcctggggctgtagacttgcgcgactagaacttactattaatctgtgagcaagagctggtcttggctttcattccttcctctgtaaccaagggctgtgctctttgcccactgcagcctctcacctcaaagtgttcactgaggttcaaggaggatgctgtgaacgtaaaaactgcagctgtgccaaccagcttctgcataattaaggattcccaccaaacactctcatgttatctagggttggagccatgctttctcagagaattgtgccaactcgccattctgattagcctgtgtaggtgtagtctcagatcacggcagtgtgaatgtattttacagattctgactaagtcatttgggtttgatttgaattctggaaaaaaaaaaaagcaggaagtcaaatagtcctgtaagttagctagaaacttctgttcagttgaagagaacagtggagatctttgatatcttcctattcaggtctgcacagcactagggacagcccccagggccggccgagggtgtgtatctgataaggacgcgtctgttctgcagaagctgtagcggctcctgtgtcaactcgtttcttttgcgggcgtgacattttattgtagctacaggcagaagatttgtcttgtgtacaggggagggagcatgggctaaagtcaggggatgggcacttgtctttccaacaatgttccagtccgttttgtatcttttgggtaggtgtggtggcttcaggatgtacatgtgtatatccacaagcgggaggccaggggggctgccccactcctgttctcaagtcaagttactgttccatccctggagacaggcaagaagtctactcagagttacacagttcaggcatagtgacagtgggactcagctgccgatggctggtgctcagtcaccacgttgacgttacatattttctgtggtgcctgagttacgtggatgtccgcagtagcacagatactggattatgtgggctctgtagtgaggggatgaggttttaaaatgatcctgggatgtcgaaacattctgattttttaaatgaaaacttgtccatggcataaattggtcttttgccattgcgtgactacgtttcttgttctttatctcccgacttcactgtggtctactaccttttgaatcttcgtgggtccaatgctgcaaagcagtgttctttagctgtcgactagttcctcttgaagaatcgagggagaccgagggccctggggggaaagcacccaaaggaatgcatacatgctattttgtatctgagatgttcacatcaagagccccactcagcggagtaagagtgctcattcctcttgcagtgttcagaatcacagtaagctcttgcttcctgtttaacctggtgtgttcggtgatgagggtttctgaacatggtctctttcttgtgggcttctacagagctgcaagcgtttgctcaccacggccgctccctgccaagattccaggtgactctatgctttggagaggagtttccagaccctcagaggcaaagaaagctcatcacagctcacgtgagtcctcagttacactcctaccatagtggcttcctgttctttgtaaaggccagagtttcatttagaaaagtcccaaatgaaaagtaaatgtcaaatgacctggaaaaataagcgtaacccttaaactagtgagggaggaagcatggtccaacgagcagcacagtctgaggactcacgtgctcctcccagacttgagatctgctcatcaaagaaccagggaggacagcctcaaaggagggtgcctctttccccatcttttttatttttcaggaaagttgtcgtatttccattttatagggattgaaaaagattgatggttaaagttgccctttaaaattctccaggttaagattgctgtaagaatgctatctagctagtggatcttcattcaatggaaaagcttttcccaaatgagaaactatccattccctggaggcattttgtaggtctctgcagctgtgtcctagcacctcttttatttctggaattttagaaattatttaattattgggcatatgatatttgaaagaggctgaatctttcaaggaattcaagcaaatcagaccctctcgtaatgttctctagcatagctcaagatgggttcaactgtggcaagtaacactaaaagggtagggttaggattagggttagagttttcttttttatgagaaaaggtttccatagataacatgaagcattaatttgccatgggaaacagaatcttgaacccttaagacttttgaatttgaaaacttcacattgctacatacttgcaagcattattaacgggcttgcatgctgagcaataccaggtaaaagttacaccccctaacatcaaagttctcatcatgttctagctctgatgctatttctcattgagaactgaaatgaaacatggtttaatcttgaacatacaaccccccttcttgattttaaaaacaaagaccagccaaccaaccagtatataatcccatagactcaggagttttctcatgagttctctccagtgattgacttaataattgatatgattgttgaaataataactgatacattgttaacaacaggaattgctaaatgactaaataaacttggcattgataagcagcatttaagaagttgatgatcggccgggcacagtggctcacgcctgtaatcccggcactttgggaggctgaggcgggcagatcatgtggtcaggagttcgagaccagcctgaccaacatggtgaaaccccctctctactaaaaatacaaaaattagccgggcgtggtggtgcgcacctgtaatcccagctactcgggaggctgaagcaagggagtcacttgaacccaggagtcagagcttgcagtgagccgagattgcaccactgcactccagcctgggtgacagagtgagactctgtctcaaaaaaaaaacaaaaaaagaagttgatgatcagctcagctatcacatcaatccagttttaaagttgacatggatgcaagtcactgtcctctaagtcagggaaagatggatccccagatgaccccctcatgctgaagacgaggctgcgtggtccataaaatgaataaacacacgtgtacacctatgagttccacttttaaaaattattaatttaattcatttcaggtacttaggagtttagcttaagtcgtcatatataaaatacagtctctaatatcatgattgatggagagcattcagcttgccttagatgctgtaaattcaggaaaagctgaacattaaggcgtttttgttttttggtgagtgtgatccacgctaataaccagacagtataaatttgaggccagttagcttctctttttccacaatagtagttttgttgttgtttaactttactttttatttcttttacctctggttgagaactatacagattacctagaaatcaaatcattcaggatgagctccttgtttctttcaaactgcagttgtggaaaaacaaaatcattggcctaaattaccctgcagattccctcagacttccttttaatttgatcactttacttgatttgatgcagttttagttaaatgtacattttaagtggcagtcgatttgaaagtaacatctttaacccagaattaagtcactttggctgtttttttacatgttgatctatggaaggactaaccaaaaaattgcttctttagatggctccaaatatgaaatgttttgatgtgttctaggatgtaactttgggctttacgttactgtctccttagaatctgagtgctgtttaatagtgagccagttgcaggatatctcagtaatgtctttttaaaatctcttattaaaggtagaacctctgctagccagacaactatattattttgctcaacaaaacagtggacatttcctgaggggctacgatttaccagaacacatcagcaatccagaagattaccacagatctatccgccattcctctattcaagaatgaaaaatgtcaagatgagtggttttctttttcctttttttttttttttttttgatacggggatacggggtcttgctctgtctcccaggctggagtgcagtgacacaatctcagctcactgtgacctccgcctcctgggttcaagagactctcctgcctcagcctccctggtagctgggattacaggtgtgagccactgcacccacccaagacaagtgattttcattgtaaatatttgactttagtgaaagcgtccaattgactgccctcttactgttttgaggaattcagaagtggagatttcagttcagcggttgaggagaattgcggcgagacaagcatggaaaatcagtgacatctgattggcagatgagcttatttcaaaaggaagggtggctttgcatttcttgtgttctgtagactgccatcattgatgatcactgtgaaaattgaccaagtgatgtgtttacatttactgaaatgcgctctttaatttgttgtagattaggtcttgctggaagacagagaaaacttgcctttcagtattgacactgactagagtgatgactgcttgtaggtatgtctgtgccatttctcagggaagtaagatgtaaattgaagaagcctcacacgtaaaagaaatgtattaatgtatgtaggagctgcagttcttgtggaagacacttgctgagtgaaggaaatgaatctttgactgaagccgtgcctgtagccttggggaggcccatcccccacctgccagcggtttcctggtgtgggtccctctgccccgccctccttcccattggctttctctccttggcctttcctggaagccagttagtaaacttcctattttcttgagtcaaaaaacatgagcgctactcttggatgggacatttttgtctgtcctacaatctagtaatgtctaagtaatggttaagttttcttgtttctgcatctttttgaccctcattctttagagatgctaaaattcttcgcataaagaagaagaaattaaggaacataaatcttaatacttgaactgttgcccttctgtccaagtacttaactatctgttcccttcctctgtgccacgctcctctgtttgtttggctgtccagcgatcagccatggcgacactaaaggaggaggagccggggactcccaggctggagagcactgccaggacccaccactggaagcaggatggagctgactacggaactgcacactcagtgggctgtttctgcttatttcatctgttctatgcttcctcgtgccaattatagtttgacagggccttaaaattacttggctttttccaaatgcttctatttatagaatcccaaagacctccacttgcttaagtatacctatcacttacatttttgtggttttgagaaagtacagcagtagactggggcgtcacctccaggccgtttctcatactacaggatatttactattactcccaggatcagcagaagattgcgtagctctcaaatgtgtgttcctgcttttctaatggatattttaaattcattcaacaagcacctagtaagtgcctgctgtatccctacattacacagttcagcctttatcaagcttagtgagcagtgagcactgaaacattattttttaatgtttaaaaagtttctaatattaaagtcagaatattaatacaattaatattaatattaactacagaaaagacaaacagtagagaacagcaaaaaaataaaaaggatctccttttttcccagcccaaattctcctctctaaaagtgtccacaagaaggggtgtttattcttccaacacatttcacttttctgtaaatatacataaacttaaaaagaaaacctcatggagtcatcttgcacacactttcatgcagtgctctttgtagctaacagtgaagatttacctcgttctgctcagaggccttgctgtggagctccactgccatgtacccagtagggtttgacatttcattagccatgcaacatggatatgtattgggcagcagactgtgtttcgtgaactgcagtgatgtatacatcttatagatgcaaagtattttggggtatattatcctaagggaagataaagatgatattaagaactgctgtttcacggggcccttacctgtgaccctctttgctgaagaatatttaaccccacacagcacttcaaagaagctgtcttggaagtctgtctcaggagcaccctgtcttcttaattctccaagcggatgctccatttcaattgctttgtgacttcttcttctttgtttttttaaatattatgctgctttaacagtggagctgaattttctggaaaatgcttcttggctggggccactacctcctttcctatctttacatctatgtgtatgttgactttttaaaattctgagtgatccagggtatgacctagggaatgaactagctatgaaatactcagggttaggaatcctagcacttgtctcaggactctgaaaaggaacggcttcctcattccttgtcttgataaagtggaattggcaaactagaatttagtttgtactcagtggacagtgctgttgaagatttgaggacttgttaaagagcactgggtcatatggaaaaaatgtatgtgtctcccaggtgcatttcttggtttatgtcttgttcttgagattttgtatatttaggaaaacctcaagcagtaattaatatctcctggaacactatagagaaccaagtgaccgactcatttacaactgaaacctaggaagcccctgagtcctgagcgaaaacaggagagttagtcgccctacagaaaacccagctagactattgggtatgaactaaaaagagactgtgccatggtgagaaaaatgtaaaatcctacagtgaaatgagcagcccttacagtattgttaccaccaagggcaggtaggtattagtgtttgaaaaagctggtctttgagcgagggcataaatacagctagccccaggggtggaacaactctgggagtcttgggtactcgcacctcttggctttgttgactgccgccaggaaggccacttgtgtgtgcgtgtcagttacttttttagtaacaattcagatccagtgtaaacttccgttcattgctctccagtcacatgcccccacttccccacaggtgaaagtttttctgaaagtgttgggattggttaaggtctttatttgtattacgtatctcccgaagtcctctgtggccagctgcatctgtctgaatggtgcgtgaaggctctcagaccttacacaccattttgtaagttatgttttacatgccccgtttttgagactgatctcgatgcaggtggatctccttgagatcctgatagcctgttacaggaatgaagtaaaggtcagtttttttttgtattgattttcacagctttgaggaacatgcataagaaatgtagctgaagtagaggggacgtgagagaagggccaggccggcaggccaaccctcctccaatggaaattcccgtgttgcttcaaactgagacagatgggacttaacaggcaatggggtccacttccccctcttcagcatcccccgtaccccactttctgctgaaagaactgccagcaggtaggaccccagaggcccccaaatgaaagcttgaatttcccctactggctctgcgttttgctgagatctgtaggaaaggatgcttcacaaactgaggtagataatgctatgctgtcgttggtatacatcatgaatttttatgtaaattgctctgcaaagcaaattgatatgtttgataaatttatgtttttaggtaaataaaaacttttaaaaatttgtta

SEQ ID NO: 12837 - DNA, 10835 bp, Homo sapiens
aggttcacaactacatgatgccacccctcgaccgaagctggagggactacgtcccggatcagccacacccggaaatcccgtaccaatgtcccatgacgtttggaccccgcggccaccactggcaaggcccagcttgtgaaaatggtaaggaggataccagtgcaggaaatagaagagctaactgctaatgtggccatgggccatggcgaatcctggtctgtcctgggcagcaccaaagctctttccccttcttagaggctgcgtgtgcagctcggggagaggggggttttctcactcctgtgggatggtggcatcccacagccaagtttactctcaggatccatgctaggcactgcccttcgtgggatcctatttagacaccacagagatcactccaggcagtggaaaacagccccccactttttatatagagaggagattgtggaagctcataaataataagtagggatgctgggagattattgagctggtatatttctctcgaatagtggtgtgttcattgttgctattgttggaattagaggtgatactaaaaaaggaacggaaaaataccatggcaaacacataaaacgtctctacaggtgcctacctaccactgggtcccagaaagacttgctgattgtggattagatgtggtcccctgccctcgggagttccccagacatcaaaatgagctccctcagcagaagctctcattagctgggtgcagggagaatctagcaatgcggtaactcaggccttcaggacttttgagttagttacttaaatggaagtcctgagacaggtcaacacactgaaccctttggatgttttaggaatatttgttcctttgcaatttggcctttttttccccagtcatgttcaggttatccttggctgcaggtagtgaagaggtgtaccactctttaatgtttgtactgagtggcatgttcacaaaaaagctcagaattcagttgcattggcttttcaagagggatttgcagcaagggctggtttccaatatggtagtggaggaattggctaacataaaactagctcctgaaattcagacttgcgtttactgctctggctctatggaattagtaaccatgggaaagaggcaatgcttagaattgtgtaaagtgatggagtaggtagagacctgtcttgaagcatcggtaacagtaaatgaagcagcagcaagatcaggtgttctgtgccacattctttttccattcatgtttcatacaacattgtcttcaggaacatggttcagtgttctcccaacccacaagagacaagcaaaataaaaatggactaaataatttgctagtttttaattgggctctttggcacagactcaagtagacctgaactctcagctctgttgtgaacccgctttgtgaacaaggacaaagcatgtcatctgtctctgagcctcagtctccctgttagtcagttacagagagagcgctccaagtttccttccaaagctgtgcactggctcgtttctccatcagctttggttttccagttggtctccagctcatctttgcctcacaagagcgtgccctgctagttgctggtgctgggagtgggtgggaaggtgattgggcgccagccccttccttcccaggcttcacacacacaccccaggaagccccgcagtgcgtcggactctctgtctagacatcatctgatttttatttgcaaatgcaggttgccaggtgacaggaaccttttatgcttgtgccccacctgagtcccaggctcccggagtccccacagagccaagcataaggtctgccgaagccttggcgttctcaggtgagtgcagggtttgctcctggaggcaccgcaggaggccagcctctgctgccagctctgtcatctttgggcagattcgatgggactttagacacttgctttgctccctctggggtctggagtagatgtagacacatcctgtgtgtgaggtgaccagggtgatttaggagcaccattagaaaacctgacatcactgcttgtggttctgctgaccgtttcagccactggcttgaatggagtcattttggcttcttcactggcacctctctgaatttctaggaatgtgcctttacctttaccgagggcccctcttcagccaacattctcacgatgtggaataattgcttggaagtgtagaagggcttctcattttgagaagctgatcatccttccaggttgagccacaaataagtcctcctcctctactccctggggacattagttctggtccctcatctctaaaacattgatgtgcctaagagtaatacacattttggtcttcctctgaactttaatatagcttgcaaacaaatatggattcaatctgatttttaaagttttatttctaaaaaaaaaaaaaaaaatccctgcaccatggagatcttacctactataaagaaggcacctctaggcttggcaagcacacgtgctatatgtatatttatttttcagataatattttggattgtttttaaatgggatttgtttttatattaaaaccaaatagcttaaggtttggaattctcatcttgccctctggcatctttaaaaatcagtgatgaaaaatactaactaaattctgaaggtttcagggaggcgagagttgtggcacttttgctgctcagaggggagctggagtttgacctaccagctctttctagttgtgaatgaggcttgcacctttttttctgaggtgctcgtgagtaactgaggatgccctttgggaggaggtgcttctgagcaggaaggcttgtgtttgtttttagaaactttcaaacccttgtcttgaacacctaagacttgtgtgggtgcctgaagagtaggaaataaacagctatttatatctcggcaacctcgtgatttctgatgacattaaatgaaatgaaacctgccccgagaatcacctcgaatggccaacacccactctctttggggcgcactgtctgactcgctttcagacagtgtgttgaagcagagaattgagacagtgatgtgggttaagtctcaaaacctgctgttgaggaataagatagttttgtgggtttctttttttggtatgcatgatacagattaattatcagccatgagcacatttattagataactgtgattcccattgattttggggttccatacagttaccagtggcagctgcctcctgtctgtgccactcccctgcggtctggctgaggagcttgtgcaaacccagcttggttctttcaactcatgggcgatattttaaagaggcttctgaaatcagcaaaacgtttgtaaatggattcatcttgtttaaagtttcagagagcgcagttttagagttcttttcaaacttaaacacaaagcccagtgggaatttcagcagactttacatgaacttttagagtatttttctcattaatttctttcttttcacaagaattaattttgtgataaaaacaccacatatccagtgtggaaaactaatttaaaaatcagaaaaacaaaaatggaaaataaaaacatcacattctaccacccagaaatcaccattaaggcctcagtgcttaccctttaatgtgtgtatgtgagtgtgtttatatataaattatatagacataaataattaagcacctaattctatatataatttatatatgtacacacacacacacacacacacacatttgctttttacctaaatgatgtcatgttattattttggggacgtttcaggtatgtggaccgacttgcttctttctgaaacaccgttatattttttgctagtataaattaaacttagggttcatttcctccaaagtaaaaattgatttgcttaaagatgaattttcattcagtgacacatgacttaaatgacatcaccactatcatcatcataattcacaaataagacttagcaagttcttaatagtgatgctctataataggaattcaacttacatttccagaaaattaatgaaagatacacttgttccttaaaaaaagagtcggtggccacatacgtttgtaatatgctggtttagacagattaaatgggtttctttccacgggacttctccaagtgttgaccgagctcatgctgtctgtggatctctgggggagacaagggcacgctgtgtttcccaggcctccttgacgcgggaaccttttgttccccccacgggacatgtgggacactagagttccaccacaggtgcttggctctgtggagtcgttggcctcgaggtggtgtccttggcccccagcactgactccggagctctgtgtttgcagactgccggctgcacatctgcctgtactaccgggaaatcctcgtgaaggagctgaccacgtccagccccgagggctgccggatctcccatggacatacgtatgacgccagcaacctggaccaggtcctgttcccctacccagaggacaatggccagaggaaaaacattgagaagctgctgagccacctggagaggggcgtggtcctctggatggcccccgacgggctctatgcgaaaagactgtgccagagcaggatctactgggacgggcccctggcgctgtgcaacgaccggcccaacaaactggagagagaccagacctgcaagctctttgacacacagcagttcttgtcaggtaaggcacctcgttatctgttagaatggaggtggtgatggcctgcctgccacaggggtcagaaaccacagggtccctcccaccccaggctgaggtcttcctcctgttgacttcggcgcccactgggcttggggcttgactccagtagagatcttctgtctggctctgttgtgggcagagagtccggatcagatggtccaggtggaccatggctcaggctgttctcttgcaattctggttttcagcagtcgcctcttaaaacagttccatttcattgcactatgatctcgacaaatacgtctgctgatgtggcggctcttttcaggttcccagaaaaatcataaaggttggaagcatattgttaacattcttggttgtcaggtgtgtcaccctcatgcagatgctggcccacgagtgagacggagggtggagtggactgtactggttttgcacaggagaagttataggagagtgctataagttggctctgtgatatgaacatttctaagcatatttttcagaaccagtgagttttgtttttctaccttggatttcatgacaattcagcgaacctctggctggcttctgtgaagcccctcgccctgtcatgctgggcttcctcactggctttgtggggctgtccaggtggagggagcctcccgcgtgggagggagctgctctacccgccactcgccaccccaccgccaactcttcctctgccttttcccagtcctgtcccttcctgagccccttcagaaactcctgtgtctttgatttctcatgtgcctccccttttcttgaatgtgcttcttcattcaacttatttaaaataaaaatatgacacgtctgtgtgctctggcactgttgacatgtgctcgtacttctgggtgtaagtgacccaagtttttgtaagctcatccagattttcttttggtgcccaaagcaaatatgtccccagataactaagcttcaggccaggtgtggtggcccatgcctgtaatcccagcactttaggaggctgaggtgggcagatcacttgaggccaggagttcaagaccagcctggccaacatggcaaaaccccgtctctactaaagatacaaaaattagctgggcgtgatggtgggcgcctgtaatcccagctactcaggaggatgaggcacaagaatcgcttgaacctgtgggaggcggaggttgcagtgagctgagatcgcaccacggtgctgcagtttgcaggacagagcgagactccattgccccccgcaccacaaaaaaataactaagctcacacagaggctgaccataggaagagggagaactgtgctggttccccgaggcggcggcaagtgaggaagtcacctggggctggacacctctcattctaagggcagaaccatccccaagccctggccagggcggtcccatccttcttggggttgggcatggtgttcatgggggaccaaggaaattgaagggcaactggggggaccccccctcccctgtcagcatctcctgtgtctgccttgggatctggaagagctcacatgggccaggaaggctaaggcccactgggcctggatttctgaagactctggaccttggtgccagtggattcagaagataccacaaggtgagggctttctaatgaaagtgtcacaaggaactggcactggcttttctgagtgcctcttgctgggcgtttttagggaggtagagcccccgtggtgactaagctggaaggtgcacattgagtcacaggtgcactgcgtgagagacagcacaggcagggggtggacgcctgtgagtgtcctggggctgtagacttgcgcgactagaacttactattaatctgtgagcaagagctggtcttggctttcattccttcctctgtaaccaagggctgtgctctttgcccactgcagcctctcacctcaaagtgttcactgaggttcaaggaggatgctgtgaacgtaaaaactgcagctgtgccaaccagcttctgcataattaaggattcccaccaaacactctcatgttatctagggttggagccatgctttctcagagaattgtgccaactcgccattctgattagcctgtgtaggtgtagtctcagatcacggcagtgtgaatgtattttacagattctgactaagtcatttgggtttgatttgaattctggaaaaaaaaaaaagcaggaagtcaaatagtcctgtaagttagctagaaacttctgttcagttgaagagaacagtggagatctttgatatcttcctattcaggtctgcacagcactagggacagcccccagggcccggcccgagggtgtgtatctgataaggacgcgtctgttctgcagaagctgtagcggctcctgtgtcaactcgtttcttttgcgggcgtgacattttattgtagctacaggcagaagatttgtcttgtgtacaggggagggagcatgggctaaagtcaggggatgggcacttgtctttccaacaatgttccagtccgttttgtatcttttgggtaggtgtggtggcttcaggatgtacatgtgtatatccacaagcgggaggccaggggggctgccccactcctgttctcaagtcaagttactgttccatccctggagacaggcaagaagtctactcagagttacacagttcaggcatagtgacagtgggactcagctgccgatggctggtgctcagtcaccacgttgacgttacatattttctgtggtgcctgagttacgtggatgtccgcagtagcacagatactggattatgtgggctctgtagtgagggggggagggtttaaaataatcctgggatgtcgaaacattctgattttttaaatgaaaacttgtccatggcataaattggtcttttgccattgcgtgactacgtttcttgttctttatctcccgacttcactgtggtctactaccttttgaatcttcgtgggtccaatgctgcaaagcagtgttctttagctgtcgactagttcctcttgaagaatcgagggagaccgagggccctggggggaaagcacccaaaggaatgcatacatgctattttgtatctgagatgttcacatcaagagccccactcagcggagtaagagtgctcattcctcttgcagtgttcagaatcacagtaagctcttgcttcctgtttaacctggtgtgttcggtgatgagggtttctgaacatggtctctttcttgtgggcttctacagagctgcaagcgtttgctcaccacggccgctccctgccaagattccaggtgactctatgctttggagaggagtttccagaccctcagaggcaaagaaagctcatcacagctcacgtgagtcctcagttacactcctaccatagtggcttcctgttctttgtaaaggccagagtttcatttagaaaagtcccaaatgaaaagtaaatgtcaaatgacctggaaaaataagcgtaacccttaaactagtgagggaggaagcatggtccaacgagcagcacagtctgaggactcacgtgctcctcccagacttgagatctgctcatcaaagaaccagggaggacagcctcaaaggagggtgcctctttccccatcttttttatttttcaggaaagttgtcgtatttccattttatagggattgaaaaagattgatggttaaagttgccctttaaaattctccaggttaagattgctgtaagaatgctatctagctagtggatcttcattcaatggaaaagcttttcccaaatgagaaactatccattccctggaggcattttgtaggtctctgcagctgtgtcctagcacctcttttatttctggaattttagaaattatttaattattgggcatatgatatttgaaagaggctgaatctttcaaggaattcaagcaaatcagaccctctcgtaatgttctctagcatagctcaagatgggttcaactgtggcaagtaacactaaaagggtagggttaggattagggttagagttttcttttttatgagaaaaggtttccatagataacatgaagcattaatttgccatgggaaacagaatcttgaacccttaagacttttgaatttgaaaacttcacattgctacatacttgcaagcattattaacgggcttgcatgctgagcaataccaggtaaaagttacaccccctaacatcaaagttctcatcatgttctagctctgatgctatttctcattgagaactgaaatgaaacatggtttaatcttgaacatacaaccccccttcttgattttaaaaacaaagaccagccaaccaaccagtatataatcccatagactcaggagttttctcatgagttctctccagtgattgacttaataattgatatgattgttgaaataataactgatacattgttaacaacaggaattgctaaatgactaaataaacttggcattgataagcagcatttaagaagttgatgatcggccgggcacagtggctcacgcctgtaatcccggcactttgggaggctgaggcgggcagatcatgtggtcaggagttcgagaccagcctgaccaacatggtgaaaccccctctctactaaaaatacaaaaattagccgggcgtggtggtgcgcacctgtaatcccagctactcgggaggctgaagcaagggagtcacttgaacccaggagtcagagcttgcagtgagccgagattgcaccactgcactccagcctgggtgacagagtgagactctgtctcaaaaaaaaaacaaaaaaagaagttgatgatcagctcagctatcacatcaatccagttttaaagttgacatggatgcaagtcactgtcctctaagtcagggaaagatggatccccagatgaccccctcatgctgaagacgaggctgcgtggtccataaaatgaataaacacacgtgtacacctatgagttccacttttaaaaattattaatttaattcatttcaggtacttaggagtttagcttaagtcgtcatatataaaatacagtctctaatatcatgattgatggagagcattcagcttgccttagatgctgtaaattcaggaaaagctgaacattaaggcgtttttgttttttggtgagtgtgatccacgctaataaccagacagtataaatttgaggccagttagcttctctttttccacaatagtagttttgttgttgtttaactttactttttatttcttttacctctggttgagaactatacagattacctagaaatcaaatcattcaggatgagctccttgtttctttcaaactgcagttgtggaaaaacaaaatcattggcctaaattaccctgcagattccctcagacttccttttaatttgatcactttacttgatttgatgcagttttagttaaatgtacattttaagtggcagtcgatttgaaagtaacatctttaacccagaattaagtcactttggctgtttttttacatgttgatctatggaaggactaaccaaaaaattgcttctttagatggctccaaatatgaaatgttttgatgtgttctaggatgtaactttgggctttacgttactgtctccttagaatctgagtgctgtttaatagtgagccagttgcaggatatctcagtaatgtctttttaaaatctcttattaaaggtagaacctctgctagccagacaactatattattttgctcaacaaaacagtggacatttcctgaggggctacgatttaccagaacacatcagcaatccagaagattaccacagatctatccgccattcctctattcaagaatgaaaaatgtcaagatgagtggttttctttttcctttttttttttttttttttgatacggggatacggggtcttgctctgtctcccaggctggagtgcagtgacacaatctcagctcactgtgacctccgcctcctgggttcaagagactctcctgcctcagcctccctggtagctgggattacaggtgtgagccactgcacccacccaagacaagtgattttcattgtaaatatttgactttagtgaaagcgtccaattgactgccctcttactgttttgaggaattcagaagtggagatttcagttcagcggttgaggagaattgcggcgagacaagcatggaa

SEQ ID NO: 12838 - DNA, 2489 bp, Homo sapiens
ttaaatccgggcccttggtcccccgcgcgggcgcgggtggatctctcgggctctgacttgttttcgggtcaccttcaggcttcagccaggcacctgacgcctctttcccctcacggtgccagggccgggccgaactacatttcccaggaggctccgcggccaggtgcaaacagcgccgtgctgactacatttcccagacagccttgcggcggcccgggccttaaagcgtccatttcccagcggccctccgctgcgagaccgcagcccttctctggagtctcagagccgcaagacaccacgactcccagaggaccttgcgtcgggcaagaaagactacaccttccagaggcctctgcggcgccgcgacaggaagcggcgggcgagccgagtgtccttgcgcgtggatccgagcgaccatggtggcccgggtgtggtcgctgatgaggtgcgtgggggcgccggaggggacccgagtccccgaaaaagtccatttttgtgggcatccctgtctccagtctggtcccgatctgctcttcgcttcccttagagtcacttccccttcgttccccgcctatgggccagatagggaaactgaggcttcagaggggcggggcttcccgaggtcgccaatcccctccctcctgcttcccagcgagcccttggcgttcagttcgcggtgtcagcctccgcctccgagcctcagttgtcttctctgtgaggtgggaatgccggtgaatcctgccgctggcgtggatgagaagtgaatgcgtgctcggagctgcgagtgacagcgggcaggaggcgcccagggacacttggtttctccagggctggaaggcttctagaaggtcaagatcttacgtcttcactgcccctgctcactgtgggactttgagtgacccactctccccctctgggtttcagttcatcagttcaagtggcgtccagccgccctgccttgcacgttgtaaaacgagtgctgtatataataggggtctgggtcgacggtgctgcactacagagtgtcaccctgtggacggtgagccctcaggagggtctcactctccccgtgggccttggcccctgagggtggctgtcagtgtccgctgagcttctgctcctcccgtccctgcccgcaggttcctcatcaagggaagtgtggctgggggcgccgtctacctggtgtacgaccaggagctgctggggcccagcgacaagagccaggcagccctacagaaggctggggaggtggtcccccccgccatgtaccagttcagccagtacgtgtgtcagcagacaggcctgcagataccccaggtactacgggccgggaacgaggccagggtttggcgggtggtcagctctgggaggtccctccagccctgcacgatgttgtcctccatattgatgctgacctgattctccggcctgtcctcctccctccgcctctggggatgggctgctgagccttttcaccagttctttctgcccatctctttttcccagctcccagcccctccaaagatttactttcccatccgtgactcctggaatgcaggtaaggcacccagtttctttgcttggagggagacaccccagtctagcccctctccccacttcctggccattcctttctgtccatcctccttcctgcccgacacgtgtctcttagggatctaaaagggaaaggaggccgagcacagtggctcacgcctgtaatcccagcactttgggaggctgaggtgggcggatcatctgaagtcaggagttcgagaccagcctgggcaacatggtgaaaccccatctctactaaaaatacaaaaattaaccgtgcgtggtggtgcacacctgtaatcccagctgctgcttgagaggctgaagcaggagaattgcttgaacccaggaggcagaggttgcagtgagccgaggttgcaccactgcactccagcctgggcgacagggcgagactccatctcaaaaaaataaaatacaaaaattagcctggtatggtggcgcacttgtagtcccagctacttgggaggctgaggcaagagaatcgcttgaacccaggaggcgaaggttgcagtgagccgagattgcactactgcactccagcctgggagacagagtgagactccatccccgccccccacccaccccccaccgcccaaaacaaactctagagtttcccaggggttggaggctgggtgaggctgggaggggagtatcaccagtggccgtccctttcccacaggcatcatgacggtgatgtcagctctgtcggtggccccctccaaggcccgcgagtactccaaggagggctgggagtatgtgaaggcgcgcaccaagtagcgagtcagcaggggccgcctgccccggccagaacgggcagggctgccactgacctgaagactccggactgggaccccactccgagggcagctcccggccttgccggcccaataaaggacttcagaagtgttccctga

SEQ ID NO: 12839 - DNA, 12835 bp, Homo sapiens
cgaatgaggttaacaccagattgttccaaaatgttgatttcaacgtcctctggatatctcttaattttgcatgaccttgacttaactaagtctttagaagtaggcagctatcccattttaagagcaagaagaactacttcaagttcaggtaagcttttcttttttggtcaaaaagatttttctcgagaatctcaaacatagagatggtataggtttcttttctgaaaatgatagcaggaaaagggaagacagttttttaaaaggcattctttagaaagctcattgatgggtttttatctaagcaagtataatgatttgtatgtatctctgacatatcattcatatgtacctctgaatcacaaatggactaggaggaataactgctgaccctaaagtattttcttttagctttatgctagccacaggatcttttcatcagtaattttgaatcatcactatctcaaaaattagtgatggcacaaggtcttaagtccttctggaatcaagcagagcttttattaaattatggtcaatatagagttttagttttatctgtatcctagacttacagatgtccagacacaggtagctggtgccatcttatctcattactctctaaacgctcttttgctaaaactctgtctcttctcccattgctgattttgttagacttaagagaatttagggttcagaaaaatgtacgtattgtattttatcaacattatgtgatttaaaaaagactatatttcatctacctttgggaaagaggggactggtgtggggacatacccatcatttacattataaacaaaaatccaggggaaaaaagacttaagcatttggaacatagaatgctaataaattgctattaaaaggcagctttgaatggttggggccaggtgcgggggctcacacctgtaatcccatcactttgggaggccaaggtgggaggatcgcttgagcccaggagttgaactcaagggtagcctgggcaacataggaagacctcatctctacaaataacttaaaaatttagccaggtgcagtggctcacgtttgtaatcctagcactttgagagactgaggtgagcagatcgcttgagcccaggagtttgtgaccagcctgggcaacatggtgaaaccctgtctctacgaaaaacacaaaaattagccagatatgctagcatgcatctgtagtcccatctactcaggaagctggggcaggaggatcacctgagcctggcaggttgaggcagcagtgagccatgattgtgccccactgccctccaccctgggcaacagagaaagaccctgtgtccaaaaaaaaggaaatgaaaaaaaaggttggaatctttctccttgtgcacaggaccacttctgaaaattcctttgggaaagtacagacatcattgtactgcagtgcctggcataactgtcaaaagtagaaatttaagttttaccaacttacttgcaaacaagggatttcataaatatacgagtataatcctttgagattcaaatttgccttttaagttaaacatgataagcaactctaacttagtgagaaatagtgattttgaatgtctagttggcctatttcaactcaaaaaccaacaaggttttcagttttctaatggtaattctgatactaaataacattacaggaaattagactagtaagaattcttaacataggtatgggaccactagcaaaatgtgatgatgaaatagacactgctatttggagtaatatatcagactccactacctgatactcattttatttttttcaatgtaaactttatgtcacatttcacagtattcacataaacttggcacagtggtgcatgcctttaggcccagctactcaggaggctgaggctgaggcaggaggatcacttgaacccaggaattaggagtccagcctgggcaacatagcaagatccttgtctcaaaaaaaaagactattcacgtaatttcaagaatgataatggaagtttttggtatactttaaagaagaatctcttcatgtttctggtaatgggcctgttgtttggaccctattttaacataaaacaataggcttaagagcttagttttcattttcatggaatttttgggttccattttagtacagaaatcatgaggatccaaagacgctcctatgattatttggtttttcatttttatttcacatagtcaagtctttgatataaaagattcagaaagggactagatcttagaacacttcaaagagctgtcttgccttcctcagtcttataggccagtgatatatgagcattttttcaaaattttaaaactatggttcgagtagataattaaaaagttaagagccactaccagagttatgctaggtttattgtcagaattttttatatttttaagatttgaccacttcatcaagttcatctggtcctagagtttctggctcaccttgtcatcatagtgattctaattcttctgagaaacacatgtcacgagcctctcaaagagaaggtaggttaaaagttggattttataatcttgtaacaacagattatgccaatctgattaattattgattgattaaaaccagttttatggttttaatccataaaaataaaagcaatggagatgaggtgatttatccctcagtcatcatcttcaaaaagctaaccgagagtccctggggttgaatatcttgagttaaatcttaatagaacttgagctttggttttattagctggacttagtttggtctagtttggagaggaagtagttcagaaatatagatttcaatcaagattgttgtgaaaattaagtgagattatgcacgtgaaagctctgtataaatataagtcatgaattttcaggtaattgtgaaagtcacctggttaccctcagactttttgctctgccatttccttgtctgtgcaatgcctgacagcttccaagggtttgtaggataaagtgagctaccatctggctcctctctgtatttcccagttttttcctagccattctggcagaactagttgctctgccctataccttccaccacacccccccagttgaaatggtttctgcctatacaaattccacatactgttcctcttcatactaactgacgtctaagctcttataccattcattgtttattcttctctttgtgaactgagtattaagagccagagatggcttgcttttttttttgtcattttgggtcacttttggagatagacatttctctaccttgttattttgggcagagactaaatcttagacttctaatttgtgttttcactgggtggctttgcctagtagatgctggttatcttgcatggctacttatgtcagtagaatggtttaagagctctttctaacctatatggcctatccacttgcctctggatattgaagtctgtgatatttcactttaaggttaaaggctcctcctcttaaatttaaagatttatgcccagaagtataacatttttcctttgatttgtaacacaaacatcttttgcagattcttcctgttctccttccacttgtgctatgggaaacaagtcaaggcttctaataatcattgagaaaaatctttattgattgactacaccatccacaagaaaaagaaacttaatttaagaagaatagttaacatgcttgcttgttattgaccagtggtaaacacacaaacacaaatatacagcagttctatgccacagagagttaagaatgagggaagagatgatatatgaggaggctgggaagaagaggaaaatgagagggtgaaaagagagggaaaacatgggagaaggtggggcttataggtgaagttgctctaaatgttggaaatcctggatcttcagatgtcagagtatgttaacactatcctttggcagatataatagctgtatagagcagaggctttcaaatgcatttcagcattagaactctatttttgacatgaaatctgctgtggattcttagagatgtagcacaaataaaatcaaagtagctctggttcaagaaaaattagggaggctcttgaccctccagccttccccactccatctacacctcagcccacacgtggttccccacttttgccatctcctgaggaaccccaaaggagcacagttagcaaaccacctacttagaatgcatttcttgtctggttttgttataggttttccaaattaattcttaaaataagagtatatttttctctaaaattgttaaagttcaatcatatgtgaaatagttatttcagtatagttttgttatagcagtgtaatttagagcttcacaggtttctgttaatgatgtagtaatctgaagggaatctttagaaagaaggtaacacatctgcttgacaagcaattcacaaaggatctgacagagggagctcaataccttcaaaataactccttccacagtcagagaagtgttgaaatatttctcttgctattaaatttctaagttgcttccttacagtgtctatgaaagtggtttttcacgcacctgaaggatataacatattcctattattaacagtgccttactccagcagtcattttcattgggagttaggtagaaggaaatgatgaggcatagtagagtctatgattggcaatgtctcccatcccttgttttgacatgcctttatgtgaggtgtcctttcttacctccaacattttattttttgtttatagtgttgttattgcaggtgcttaagtcctgatctttttatttgcttaaaaggcaatcctcatggcttccaagtatttccttctctggaccagaaagcaccaggaccaatgagaggagaattgttaccttttacctttctagagtcctttcatgtcacataactttggttcttacttaaataaagagctttctgagatgtaagatccaaataaaagaacccctagtcagcttctatgccttagccttaggtcagtgacaattactgctgtgggaacttggatcttttgttctatttataccctttccccacaccttcaccccgccaaaactcacacaccatacattggggagtaccacgctctttaacatatggtagcataaggggcagactaaggaatgacggcatgggaggtggctgccagaaataaaaagctttgatgaactgccttagttttttgataatacaaatcccacatcctcattttcttatatctcaggagtttcaccacgaaatagtcttgaagtcgtaacccctgaagttcttggtgagagtgaccacggaaactgcatcacgtccttacagctgcacccaaaaggctgggccactcttcttcggtgctcaagcaacagtgatgatgaggaggtacaggcagcagcactccaccttcaacagggctcattggacaaattgccattgccgtgtgtgcagagcttaggccgatcgctgactgcagtctctgccttcaagggcatactgctagagatcctgcttctcgactctcctgtttctgtcctctcttgcttcatatggtatcattatcccttccaaactcttcttattcctctcctgctggggttgagcaaggtgggaggtactttaaaggccagcatcagctcagtttttgcccagcttcttaaatcttgcctctttcatctcaccctaaacaaacaaacaaacaaacaaacaaaaaccccttgtataataaacataggtctgaaatgtttcagctaagctggctaaatgtgagattttactaagccaattgagtatcataattttctttttttaaaaaccaggggaaactctgggaaaggaagggactatactgatgactagggggaaaggtgttaaatgactttatgattctcatcactctggaaagcaagagtcttccaaggatctcactggtcctagaggccacaactgaaaggagagaagagaagagcctttgaattgtgtaggggaagaggtaagatactctagggcttggatgtactccaggaatttttaaaatatcaacattgttgttgcccttagaaaagagaatgtattactgcaaaagtcacaggcagcctcagggaacaaaaggctttaaagcatcataacacagaataacctcagcttatgaagataagaaagtagggggcctacaagttttgttagttgggagggggatagcattattctgagtgatttcttgtaaaaattctgtggctttggcaatctgttgagctttttaaaaataaggaatatctgtagcactatttgggctctgtaaccttggtttgtctcccttctctccccctagtgtacttgtgtctatgaattccaagaaggagctccagtgcgacctgtctcacctcgctgttctctacgactgactcattacattgaagaagccaatgtaggcaggggttacatcaaagaactttgcttcagccccgatggacgaatgatttcttccccacatggctatgggattcgcttgttgggatttgacaaacagtgcagtgaacttgttgactgcttgcccaaagaagccagtcccctgcgggtgatccgttctctgtactctcataatgatgtggtactgacaacaaagttctctccaacacattgtcagattgcctcagggtgccttagtggacgggtttctttgtatcagccaaagttttaggcacaacttacatcaaataaggaactcttctggtgtttgacttaggaattgcttcaatttagatgaagtattttctttttagaagatcttataagtttgggtcaagatcctggttcttatgggtccatgaacacacttgtgaccttagtacttggtcatccagcatcatacaggcatctccaagttagactctatgcagcatcatcttttgcagcattcctctgctcctgctgatctgtgccactgaactccagttcttctggtcattttgcatggtagctcttgtcacgttccttccttcctcactctctatttctctttccctctccctgtccctctctttctttgtgtttgttgattttggtgtcaattttgtggacatttggcaggagttttgactggggtaggagaaacccatgacattagaattgaataaaacctagaagttggatattggcatattggttgttgaaaaataaatttcatcctcacttatgagtatacttggccttttaaagttactgttatgtttatctatattgagcacagataatggcattattcttataattgttaagatagtcttgcaacaaaatgtcttttaagtttcctgttaaaattataaaaagattttcatggtgagagggattttattgtgaaattctagaaaaaaatattaccacctctctttgtaatttactttacttgtatgaatttaacatctctagcatgtatccttacttgatattttgttcctatcaacagcattagaaaggaaaggagacagaatgagctttggttatttctattgcacagaaaaggatttttaaaattagattagtataatatctggccatagagtgataagaacaatatgacttagattttctgtatttcatctgccagattatttgaatcacacaggatgatgtgttaacagtattagggtggaagaggaatcaagagtaaagaggtaggggtttactcatttttcttccctgagccaggtgtgacaagccaactctgtcaccattcgtgaggggagagttgcagtcctcttcaagctgttatcataagtacagtagtcagctacttggatatcaagactaagtgctgatatgaagacttgcctttgtgttttgttatgaaacacgcaagcataaagcaggactcaagcacaaggctgactgttctactttgaataacagcttccttgcagtctcctccacatgggtggtactgtgtttagaagggattaccaaaggctggagcgatttaagctatgcactagccttgccctcttaggttgcattctctttaggccactggttctcaaacattagggtgcactgtaaccattacagagcttgtgaaaagtgcagaaacctgagcctcaccttatgagattctgattcagccagggggaggacaggaatctgtatttttcatagcaacctcaagtaatctttattctgagggtctcgggattgcaggttgaaaaacacaaccttaatcagcagtaaattcttctctactcggccaggcgcagtggctcatgcctgtaatcccagcactttgggaggccgaggtgggtggatcacaaggtcaggagttcgagaccagcctgaccaacatggtgaaacgccatctctactaaaaatacaaaaattagccgggcgtggtggtgctcacctgtaatcccagctacccaggaggctgaggcaagagaatcacttgaacccgggaggcagagggtgcagtaagccgagattgcaccactgcactccagcctaggcgacagagcgagactctgtctcaaaaaaaaaaaaaaaaaaaaaaaattcttctctacccatttgggcttaagacaattcccagaaagtgttttcattatttaaaaaataataatagtaaatgaaagcaattttagaggtggaaaataccttagaatggaatcatttgcattatttgacaaatgagagaagtgacatgacttgcctaaggtcatcctgcaaagttagtggcagagttaggacttgaattccagtcttctaattccttggtcagggcaatttctactgtgttatgctgtctgttagaaataatgacttatggacactttgtctttaagttgtattattgtaaatacccttaaactggccaatagattttagaaaggcaggcatgggagtagatgctgagaattctagccataagaagaaaagtattttaaatcttacagaaatgtttaaacaacccaaaatacatgaataaaaatgacatttctttgtaggacctgccaactaactattcacacacatttatagaggttataaggatcttggctctagaacaaatttttgaaattagatcattttaccatggatgttaacaaaattggaaattttttgtcactgagaaaattatcacaaagcacagtaaatacatatacttaccatacattttgtaaaaaacacattttttaaagaaaatagggatgggtatggtggctcacgtctgtaatcccagcactttgggaggccaaggtgggaggttcacttgagcccaggagttccagaccagtctgggcaacatggcgaaaccccatctctaccaaaaatacaaaaattagatgggcatgttggtacacgcctgtagtcctagctactcaggaggctgaggtgggaggatggtttgagcctgggaggcagaggctgcagtgagccaagattgcactattgcactccaccctgggcaatagagccagatcctgtctcaaaaaataaaaatagactgggcatggtggctcatgcctgtaatcccagcactttgggaggctgaggtgggtggatcacttgaggtcaggagtttgagaacagcctagccaacatggtgaaaccctgtctctaccaaaaatacaaaaatcatagccaagcgtggtggcaggtgcctgtaatcccagctactcaggaggctgaggcaggagactcgcatgaacctgggaggcagaggttgcagtgagccgagatcgcaccactgtactctagcctgaccagcagagcgagactctgcctcaaaaaaaaaaaaaaaaataaaataaaataaaattagttttggaggtgaaaacacccaaactgttattatttaaaaatacctaccaagtactgtggtcatattgacattcaaaagaagtttcataaatcgtatcaactctggaaagagttcatgtcagatgctagaccagcaagttacccaactcaaaattcagccaatgattctttactatagagtacctatcatgtgtcaaataatatacagacttcactactaaccctcacaaaaacttgcagggtaggtggaatgagccccaatttaatttggaggtaatagtgggtcagaaagattaaatgacttgccttaagtcatagagttagcagtgagtggcagcactgggattcaaacccaggtttgtgtcttgtccaaagcctgtgcttactgctttaccattgtgctctttagtttgtaaagtatggtaagctggcctgttatttgtttagtatcttctggattttttttttttaattatagagctagcttaccgtgtgtatcatgtaaaaaaaattcataagattaacaatttccatgagaatatcataaactcagggcacacattctggccattcctgactaaaaaacttcaagcagaataagcagctataaaatagaaaagaaaaattaaggataaacggcattgtgaaaaaaaaccgagccacacagatgagaattaaaaattaacagccagcaaactcaaaagaacctttgtcctccttgagatatggtgatgatcaaaaagttagcaaggaatattaatcaaggaattaaagggcattaggaatgctatagtattggaagaaattacatcttaacatttcaaagccccatttcacttaagagtaaaatctaatctgatgttttttactctgaattttattcagtaatttttattcataattcatgataattggtaatgtagtataattgttagtaaatgcagtacaaattgttctactgttttaaaaagttttccgcagaacagtgcatttatggcaatgctatgtttaatgagttagggacatcaaatatatagtagttccttattttcagttgtgaaaatgaaatggctaaagcagaagagacgtctattttagtcttttaaaaatgtgtgtgggtggtcttttttcctcagaagcccaaagcacatgtatattttgttatttctccttgctatattcctgagactatactaaaaactttaagaaaaggaacaagaaaaaggtaaattcatgtgttccccactgctgtgtctagaaccaagatcacattatatcattgttaaaattgtgttatctagaaagtgcaatatagggaaaacactctaagaatcttttaaaagcctagtgtttcccttatttgtcagaatatgtggtagtggcatccataagtatcttttaacttgcatttagcaggacaaatagtgtgatacttatactgatgacaatcatccccatttaatgaccagcagtcactgagcgctgtgaaaattcactcagtgataccccgtgttggtcttgaaggaaaccgtacatatgaatttttggatagctaatgtatatctctcaagtgccaacatttaaaacttgtaattatttttgatgtgagtatttcaggtatgttagtataccttcctgccttcttcttaaacatcatgctcagtataattcacattttcatgatgaaaagttaaagttatattcataatgtattattataagtatccagctctgatgtatgtaaaacacttcataaaatgtaaagggctataacaaatatgttataaagtgattctctcagccctgaggtatacagaatcatttgcctcagactgctgttggattttaaaatttttaaaatatctgctaagtaatttgctatgtcttctcccacactatcaatatgcctgcttctaacaggctccccactttcttctaatgtgctgttatgagctttggacatgagataaccgtgcctgttcagagtgtctacagtaagagctggacaaactctggggggacacagtctttgagacagctcttttggttgctttccacttttctgaaaggttcacagtaaccttctagataatagaaactcccagttaaagcctaggctagcaattttttttagttgcaactaagtaagatatactacaaactaaggatgctgctagactaaggaataaacagcaaggtaccaaagtacagcaaagcaacaacaaaggctctgtatttgcagaggggtctatcatgcttttaagaaaaaagaagagtacaggaaaaaaattcagatagacataagagtattttggatgccattaaactttgtcaataaccattaaaacataggcttaaattatcacgtattgttacaaagacacagttttgtctcattataaaataagattatatgaaatttatattctagaaatgattccaaatcatgtcctaagaatttctcccattcaaatgataatggaaattactgtcaaaaggaaaatctcaaagttaccattacgctgctctcttgtaaatgaactagggataaagatatgggttttatcaaaagccctaaggaatatatctcacattcacctcctatatgtatgtgtatatataaatgccactataaatgaaaatgtcacccagagataataaaataatttttaaagtttaaatctggtccaaagtctttaaaataggtagattttcagctttcttaagtttctccctcatttagatttcatggtttttacataaagggtgaatatttgaattttcttttaaatttcactgcatcttcaattgcccaactgtgtttcctgataaattttagattcacatttttaggaaatttggagtattccagacaatatactagatacccagaaacttttctcagtaggttctgaggtgttttaagttcttatgctagactgtaagctccttgagggcagagactgttttatttattcttgtatcctcagtgcctggtacaggacttgacacagagtagttgttcaataaatatttgttgaatgaatcaaa

SEQ ID NO: 12840 - DNA, 12892 bp, Homo sapiens
aggtatacagaagatgggtgtccacataagaaattctttcacacacgttttctcatgcgaatgaggttaacaccagattgttccaaaatgttgatttcaacgtcctctggatatctcttaattttgcatgaccttgacttaactaagtctttagaagtaggcagctatcccattttaagagcaagaagaactacttcaagttcaggtaagcttttcttttttggtcaaaaagatttttctcgagaatctcaaacatagagatggtataggtttcttttctgaaaatgatagcaggaaaagggaagacagttttttaaaaggcattctttagaaagctcattgatgggtttttatctaagcaagtataatgatttgtatgtatctctgacatatcattcatatgtacctctgaatcacaaatggactaggaggaataactgctgaccctaaagtattttcttttagctttatgctagccacaggatcttttcatcagtaattttgaatcatcactatctcaaaaattagtgatggcacaaggtcttaagtccttctggaatcaagcagagcttttattaaattatggtcaatatagagttttagttttatctgtatcctagacttacagatgtccagacacaggtagctggtgccatcttatctcattactctctaaacgctcttttgctaaaactctgtctcttctcccattgctgattttgttagacttaagagaatttagggttcagaaaaatgtacgtattgtattttatcaacattatgtgatttaaaaaagactatatttcatctacctttgggaaagaggggactggtgtggggacatacccatcatttacattataaacaaaaatccaggggaaaaaagacttaagcatttggaacatagaatgctaataaatttttattaaaaggcagctttgaatggttggggccaggtgcgggggctcacacctgtaatcccatcactttgggaggccaaggtgggaggatcgcttgagcccaggagttgaactcaagggtagcctgggcaacataggaagacctcatctctacaaataacttaaaaatttagccaggtgcagtggctcacgtttgtaatcctagcactttgagagactgaggtgagcagatcgcttgagcccaggagtttgtgaccagcctgggcaacatggtgaaaccctgtctctacgaaaaacacaaaaattagccagatatgctagcatgcatctgtagtcccatctactcaggaagctggggcaggaggatcacctgagcctggcaggttgaggcagcagtgagccatgattgtgccccactgccctccaccctgggcaacagagaaagaccctgtgtccaaaaaaaaggaaatgaaaaaaaaggttggaatctttctccttgtgcacaggaccacttctgaaaattcctttgggaaagtacagacatcattgtactgcagtgcctggcataactgtcaaaagtagaaatttaagttttaccaacttacttgcaaacaagggatttcataaatatacgagtataatcctttgagattcaaatttgccttttaagttaaacatgataagcaactctaacttagtgagaaatagtgattttgaatgtctagttggcctatttcaactcaaaaaccaacaaggttttcagttttctaatggtaattctgatactaaataacattacaggaaattagactagtaagaattcttaacataggtatgggaccactagcaaaatgtgatgatgaaatagacactgctatttggagtaatatatcagactccactacctgatactcattttatttttttcaatgtaaactttatgtcacatttcacagtattcacataaacttggcacagtggtgcatgcctttaggcccagctactcaggaggctgaggctgaggcaggaggatcacttgaacccaggaattaggagtccagcctgggcaacatagcaagatccttgtctcaaaaaaaaagactattcacgtaatttcaagaatgataatggaagtttttggtatactttaaagaagaatctcttcatgtttctggtaatgggcctgttgtttggaccctattttaacataaaacaataggcttaagagcttagttttcattttcatggaatttttgggttccattttagtacagaaatcatgaggatccaaagacgctcctatgattatttggtttttcatttttatttcacatagtcaagtctttgatataaaagattcagaaagggactagatcttagaacacttcaaagagctgtcttgccttcctcagtcttataggccagtgatatatgagcattttttcaaaattttaaacctatggttcgagtagataattaaaaagttaagagccactcccagagttatgctaggtttattgtcagaattttttatatttttaagatttgaccacttcatcaagttcatctggtcctagagtttctggctcaccttgtcatcatagtgattctaattcttctgagaaacacatgtcacgagcctctcaaagagaaggtaggttaaaagttggattttataatcttgtaacaacagattatgccaatctgattaattattgattgattaaaaccagttttatggttttaatccataaaaataaaagcaatggagatgaggtgatttatccctcagtcatcatcttcaaaaagctaaccgagagtccctggggttgaatatcttgagttaaatcttaatagaacttgagctttggttttattagctggacttagtttggtctagtttggagaggaagtagttcagaaatatagatttcaatcaagattgttgtgaaaattaagtgagattatgcacgtgaaagctctgtataaatataagtcatgaattttcaggtaattgtgaaagtcacctggttaccctcagactttttgctctgccatttccttgtctgtgcaatgcctgacagcttccaagggtttgtaggataaagtgagctaccatctggctcctctctgtatttcccagttttttcctagccattctggcagaactagttgctctgccctataccttccaccacacccccccagttgaaatggtttctgcctatacaaattccacatactgttcctcttcatactaactgacgtctaagctcttataccattcattgtttattcttctctttgtgaactgagtattaagagccagagatggcttgcttttttttttgtcattttgggtcacttttggagatagacatttctctaccttgttattttgggcagagactaaatcttagacttctaatttgtgttttcactgggtggctttgcctagtagatgctggttatcttgcatggctacttatgtcagtagaatggtttaagagctctttctaacctatatggcctatccacttgcctctggatattgaagtctgtgatatttcactttaaggttaaaggctcctcctcttaaatttaaagatttatgcccagaagtataacatttttcctttgatttgtaacacaaacatcttttgcagattcttcctgttctccttccacttgtgctatgggaaacaagtcaaggcttctaataatcattgagaaaaatctttattgattgactacaccatccacaagaaaaagaaacttaatttaagaagaatagttaacatgcttgcttgttattgaccagtggtaaacacacaaacacaaatatacagcagttctatgccacagagagttaagaatgagggaagagatgatatatgaggaggctgggaagaagaggaaaatgagagggtgaaaagagagggaaaacatgggagaaggtggggcttataggtgaagttgctctaaatgttggaaatcctggatcttcagatgtcagagtatgttaacactatcctttggcagatataatagctgtatagagcagaggctttcaaatgcatttcagcattagaactctatttttgacatgaaatctgctgtggattcttagagatgtagcacaaataaaatcaaagtagctctggttcaagaaaaattagggaggctcttgaccctccagccttccccactccatctacacctcagcccacacgtggttccccacttttgccatctcctgaggaaccccaaaggagcacagttagcaaaccacctacttagaatgcatttcttgtctggttttgttataggttttccaaattaattcttaaaataagagtatatttttctctaaaattgttaaagttcaatcatatgtgaaatagttatttcagtatagttttgttatagcagtgtaatttagagcttcacaggtttctgttaatgatgtagtaatctgaagggaatctttagaaagaaggtaacacatctgcttgacaagcaattcacaaaggatctgacagagggagctcaataccttcaaaataactccttccacagtcagagaagtgttgaaatatttctcttgctattaaatttctaagttgcttccttacagtgtctatgaaagtggtttttcacgcacctgaaggatataacatattcctattattaacagtgccttactccagcagtcattttcattgggagttaggtagaaggaaatgatgaggcatagtagagtctatgattggcaatgtctcccatcccttgttttgacatgcctttatgtgaggtgtcctttcttacctccaacattttattttttgtttatagtgttgttattgcaggtgcttaagtcctgatctttttatttgcttaaaaggcaatcctcatggcttccaagtatttccttctctggaccagaaagcaccaggaccaatgagaggagaattgttaccttttacctttctagagtcctttcatgtcacataactttggttcttacttaaataaagagctttctgagatgtaagatccaaataaaagaacccctagtcagcttctatgccttagccttaggtcagtgacaattactgctgtgggaacttggatcttttgttctatttataccctttccccacaccttcaccccgccaaaactcacacaccatacattggggagtaccacgctctttaacatatggtagcataaggggcagactaaggaatgacggcatgggaggtggctgccagaaataaaaagctttgatgaactgccttagttttttgataatacaaatcccacatcctcattttcttatatctcaggagtttcaccacgaaatagtcttgaagtcgtaacccctgaagttcttggtgagagtgaccacggaaactgcatcacgtccttacagctgcacccaaaaggctgggccactcttcttcggtgctcaagcaacagtgatgatgaggaggtacaggcagcagcactccaccttcaacagggctcattggacaaattgccattgccgtgtgtgcagagcttaggccgatcgctgactgcagtctctgccttcaagggcatactgctagagatcctgcttctcgactctcctgtttctgtcctctcttgcttcatatggtatcattatcccttccaaactcttcttattcctctcctgctggggttgagcaaggtgggaggtactttaaaggccagcatcagctcagtttttgcccagcttcttaaatcttgcctctttcatctcaccctaaacaaacaaacaaacaaacaaacaaaaaccccttgtataataaacataggtctgaaatgtttcagctaagctggctaaatgtgagattttactaagccaattgagtatcataattttctttttttaaaaaccaggggaaactctgggaaaggaagggactatactgatgactagggggaaaggtgttaaatgactttatgattctcatcactctggaaagcaagagtcttccaaggatctcactggtcctagaggccacaactgaaaggagagaagagaagagcctttgaattgtgtaggggaagaggtaagatactctagggcttggatgtactccaggaatttttaaaatatcaacattgttgttgcccttagaaaagagaatgtattactgcaaaagtcacaggcagcctcagggaacaaaaggctttaaagcatcataacacagaataacctcagcttatgaagataagaaagtagggggcctacaagttttgttagttgggagggggatagcattattctgagtgatttcttgtaaaaattctgtggctttggcaatctgttgagctttttaaaaataaggaatatctgtagcactatttgggctctgtaaccttggtttgtctcccttctctccccctagtgtacttgtgtctatgaattccaagaaggagctccagtgcgacctgtctcacctcgctgttctctacgactgactcattacattgaagaagccaatgtaggcaggggttacatcaaagaactttgcttcagccccgatggacgaatgatttcttccccacatggctatgggattcgcttgttgggatttgacaaacagtgcagtgaacttgttgactgcttgcccaaagaagccagtcccctgcgggtgatccgttctctgtactctcataatgatgtggtactgacaacaaagttctctccaacacattgtcagattgcctcagggtgccttagtggacgggtttctttgtatcagccaaagttttaggcacaacttacatcaaataaggaactcttctggtgtttgacttaggaattgcttcaatttagatgaagtattttctttttagaagatcttataagtttgggtcaagatcctggttcttatgggtccatgaacacacttgtgaccttagtacttggtcatccagcatcatacaggcatctccaagttagactctatgcagcatcatcttttgcagcattcctctgctcctgctgatctgtgccactgaactccagttcttctggtcattttgcatggtagctcttgtcacgttccttccttcctcactctctatttctctttccctctccctgtccctctctttctttgtgtttgttgattttggtgtcaattttgtggacatttggcaggagttttgactggggtaggagaaacccatgacattagaattgaataaaacctagaagttggatattggcatattggttgttgaaaaataaatttcatcctcacttatgagtatacttggccttttaaagttactgttatgtttatctatattgagcacagataatggcattattcttataattgttaagatagtcttgcaacaaaatgtcttttaagtttcctgttaaaattataaaaagattttcatggtgagagggattttattgtgaaattctagaaaaaaatattaccacctctctttgtaatttactttacttgtatgaatttaacatctctagcatgtatccttacttgatattttgttcctatcaacagcattagaaaggaaaggagacagaatgagctttggttatttctattgcacagaaaaggatttttaaaattagattagtataatatctggccatagagtgataagaacaatatgacttagattttctgtatttcatctgccagattatttgaatcacacaggatgatgtgttaacagtattagggtggaagaggaatcaagagtaaagaggtaggggtttactcatttttcttccctgagccaggtgtgacaagccaactctgtcaccattcgtgaggggagagttgcagtcctcttcaagctgttatcataagtacagtagtcagctacttggatatcaagactaagtgctgatatgaagacttgcctttgtgttttgttatgaaacacgcaagcataaagcaggactcaagcacaaggctgactgttctactttgaataacagcttccttgcagtctcctccacatgggtggtactgtgtttagaagggattaccaaaggctggagcgatttaagctatgcactagccttgccctcttaggttgcattctctttaggccactggttctcaaacattagggtgcactgtaaccattacagagcttgtgaaaagtgcagaaacctgagcctcaccttatgagattctgattcagccagggggaggacaggaatctgtatttttcatagcaacctcaagtaatctttattctgagggtctcgggattgcaggttgaaaaacacaaccttaatcagcagtaaattcttctctactcggccaggcgcagtggctcatgcctgtaatcccagcactttgggaggccgaggtgggtggatcacaaggtcaggagttcgagaccagcctgaccaacatggtgaaacgccatctctactaaaaatacaaaaattagccgggcgtggtggtgctcacctgtaatcccagctacccaggaggctgaggcaagagaatcacttgaacccgggaggcagagcgtgcagtaagccgagattgcaccactgcactccagcctaggcgacagagcgagactctgtctcaaaaaaaaaaaaaaaaaaaaaaaattcttctctacccatttgggcttaagacaattcccagaaagtgttttcattatttaaaaaataataatagtaaatgaaagcaattttagaggtggaaaataccttagaatggaatcatttgcattatttgacaaatgagagaagtgacatgacttgcctaaggtcatcctgcaaagttagtggcagagttaggacttgaattccagtcttctaattccttggtcagggcaatttctactgtgttatgctgtctgttagaaataatgacttatggacactttgtctttaagttgtattattgtaaatacccttaaactggccaatagattttagaaaggcaggcatgggagtagatgctgagaattctagccataagaagaaaagtattttaaatcttacagaaatgtttaaacaacccaaaatacatgaataaaaatgacatttctttgtaggacctgccaactaactattcacacacatttatagaggttataaggatcttggctctagaacaaatttttgaaattagatcattttaccatggatgttaacaaaattggaaattttttgtcactgagaaaattatcacaaagcacagtaaatacatatacttaccatacattttgtaaaaaacacattttttaaagaaaatagggatgggtatggtggctcacgtctgtaatcccagcactttgggaggccaaggtgggaggttcacttgagcccaggagttccagaccagtctgggcaacatggcgaaaccccatctctaccaaaaatacaaaaattagatgggcatgttggtacacgcctgtagtcctagctactcaggaggctgaggtgggaggatggtttgagcctgggaggcagaggctgcagtgagccaagattgcactattgcactccaccctgggcaatagagccagatcctgtctcaaaaaataaaaatagactgggcatggtggctcatgcctgtaatcccagcactttgggaggctgaggtgggtggatcacttgaggtcaggagtttgagaacagcctagccaacatggtgaaaccctgtctctaccaaaaatacaaaaatcatagccaagcgtggtggcaggtgcctgtaatcccagctactcaggaggctgaggcaggagactcgcatgaacctgggaggcagaggttgcagtgagccgagatcgcaccactgtactctagcctgaccagcagagcgagactctgcctcaaaaaaaaaaaaaaaaataaaataaaataaaattagttttggaggtgaaaacacccaaactgttattatttaaaaatacctaccaagtactgtggtcatattgacattcaaaagaagtttcataaatcgtatcaactctggaaagagttcatgtcagatgctagaccagcaagttacccaactcaaaattcagccaatgattctttactatagagtacctatcatgtgtcaaataatatacagacttcactactaaccctcacaaaaacttgcagggtaggtggaatgagccccaatttaatttggaggtaatagtgggtcagaaagattaaatgacttgccttaagtcatagagttagcagtgagtggcagcactgggattcaaacccaggtttgtgtcttgtccaaagcctgtgcttactgctttaccattgtgctctttagtttgtaaagtatggtaagctggcctgttatttgtttagtatcttctggattttttttttttaattatagagctagcttaccgtgtgtatcatgtaaaaaaaattcataagattaacaatttccatgagaatatcataaactcagggcacacattctggccattcctgactaaaaaacttcaagcagaataagcagctataaaatagaaaagaaaaattaaggataaacggcattgtgaaaaaaaaccgagccacacagatgagaattaaaaattaacagccagcaaactcaaaagaacctttgtcctccttgagatatggtgatgatcaaaaagttagcaaggaatattaatcaaggaattaaagggcattaggaatgctatagtattggaagaaattacatcttaacatttcaaagccccatttcacttaagagtaaaatctaatctgatgttttttactctgaattttattcagtaatttttattcataattcatgataattggtaatgtagtataattgttagtaaatgcagtacaaattgttctactgttttaaaaagttttccgcagaacagtgcatttatggcaatgctatgtttaatgagttagggacatcaaatatatagtagttccttattttcagttgtgaaaatgaaatggctaaagcagaagagacgtctattttagtcttttaaaaatgtgtgtgggtggtcttttttcctcagaagcccaaagcacatgtatattttgttatttctccttgctatattcctgagactatactaaaaactttaagaaaaggaacaagaaaaaggtaaattcatgtgttccccactgctgtgtctagaaccaagatcacattatatcattgttaaaattgtgttatctagaaagtgcaatatagggaaaacactctaagaatcttttaaaagcctagtgtttcccttatttgtcagaatatgtggtagtggcatccataagtatcttttaacttgcatttagcaggacaaatagtgtgatacttatactgatgacaatcatccccatttaatgaccagcagtcactgagcgctgtgaaaattcactcagtgataccccgtgttggtcttgaaggaaaccgtacatatgaatttttggatagctaatgtatatctctcaagtgccaacatttaaaacttgtaattatttttgatgtgagtatttcaggtatgttagtataccttcctgccttcttcttaaacatcatgctcagtataattcacattttcatgatgaaaagttaaagttatattcataatgtattattataagtatccagctctgatgtatgtaaaacacttcataaaatgtaaagggctataacaaatatgttataaagtgattctctcagccctgaggtatacagaatcatttgcctcagactgctgttggattttaaaatttttaaaatatctgctaagtaatttgctatgtcttctcccacactatcaatatgcctgcttctaacaggctccccactttcttctaatgtgctgttatgagctttggacatgagataaccgtgcctgttcagagtgtctacagtaagagctggacaaactctggggggacacagtctttgagacagctcttttggttgctttccacttttctgaaaggttcacagtaaccttctagataatagaaactcccagttaaagcctaggctagcaattttttttagttgcaactaagtaagatatactacaaactaaggatgctgctagactaaggaataaacagcaaggtaccaaagtacagcaaagcaacaacaaaggctctgtatttgcagaggggtctatcatgcttttaagaaaaaagaagagtacaggaaaaaaattcagatagacataagagtattttggatgccattaaactttgtcaataaccattaaaacataggcttaaattatcacgtattgttacaaagacacagttttgtctcattataaaataagattatatgaaatttatattctagaaatgattccaaatcatgtcctaagaatttctcccattcaaatgataatggaaattactgtcaaaaggaaaatctcaaagttaccattacgctgctctcttgtaaatgaactagggataaagatatgggttttatcaaaagccctaaggaatatatctcacattcacctcctatatgtatgtgtatatataaatgccactataaatgaaaatgtcacccagagataataaaataatttttaaagtttaaatctggtccaaagtctttaaaataggtagattttcagctttcttaagtttctccctcatttagatttcatggtttttacataaagggtgaatatttgaattttcttttaaatttcactgcatcttcaattgcccaactgtgtttcctgataaattttagattcacatttttaggaaatttggagtattccagacaatatactagatacccagaaacttttctcagtaggttctgaggtgttttaagttcttatgctagactgtaagctccttgagggcagagactgttttatttattcttgtatcctcagtgcctggtacaggacttgacacagagtagttgttcaataaatatttgttgaatgaatcaaa

SEQ ID NO: 12841 - DNA, 614 bp, Homo sapiens
gcagattattccgtaatagaggaatccatcatttattattataattaacagactatattcatcagggtaagatctgttctgaccataagcaagcaaacatttctcattgacttggaaaactgcaagttaagactcagtttttcattcaacgaacatttgaatccctattatatgcctagtttagtactgggaactcaagggacaaagataactatcgtcttggtattccatagctgtagttgaaagagatttagattcagggctggcttaaagaggttgtacatgtgcagttacatagtgtcccatacttagaaagattccatgtaggctgggtgcagtagctcacacctgtaatcccagcactttgggaagccgaggcaggaggatcgcttgagcccgggagtttgagaccagcctggggaacataatgagaccccatttctacaaaaaatgaaaacacaattagccaggcatggcggcatacacctatagtcccagctactcgggaaactgaggtgggaggatcacctgagcccaagaagttgagactgcagtaagctgagagcacaccactgcactccagcctgggcaacagagtgagattgcctcaaaaa

SEQ ID NO: 12842 - DNA, 614 bp, Homo sapiens; identical to SEQ ID NO: 12841

SEQ ID NO: 12843 - DNA, 25550 bp, Homo sapiens
ctactgtcatcctacaaggaggggctcttggaccagcagcaaggggatgtgaagacgggagccatgaagaaccttctggctcccatggacaccgtgcttaacaggctggttgatgctggctactgtgcagcatcccttcatacctctgttgtggccaactcagtggccttgctgtataagctctttctagattcttactttaaggagggaaaccagcttctctgcttccaggttctccccaggttgtttggctgcttgaagatttcacacctgcaggaggagcagagcaaagccctgtccacatcagattggaccacagagcttttggttgtggaacagctactaaactcagtggccaacaacaatatctacaacatcgctgccgacagaattcggcacgaagaggctcagttccgcttttaccgccacgtggctgagctgctgataaaccatgcacaagcacccataccggcctggttccgctgtctgaagactttgatatctctgaatcatttgattttggagccagacctggatgacctgctggcttcagcgtggatcgatgccgaggtaacagagtttcgaaccaaaaaagcccaggaggcgcttattcgtactgtcttccagacttatgccaaactccgacaagtgccacggttgtttgaagaggttttgggggtgatctgtcgtccagctgctgaggcactgaggcagcctgtgctggcctcgggcccctccacggtactctctgcatgcctcctggagctgcctccaagtcagatcctggacacgtggtcccttgtgctggagaagttccagtctttagtcttgccctatttgcagagtgatgccgacatggccctgaaatcactgtcactgagcttgctgctgcactgcatcatgttcaacatgaggagcctggacagcagcacgcctctgcccattgtcagacggacacagtgcatgatggagaggatgatgagggagctcgtgcagcccctgctggcccttctcccggacaccccaggcccagagccagagctgtggctgcagaaggtcagtgactctgtgctcctgctctcttacacttgggcccaggtggacgctatgttcagtttgaactgtagccagtatcactctatgtctgggccccttataggtgttgctctggagatctcgaacctcccttcgttgctcccaggtgtaaaaacacagcattggaagaagatagagaagtttacagctcagttcagctctcttggtacatattgcttagaacagctgtacctgcagaaaatgaaaaggactttaatgcaaactagtttccggtctgaaggagccatccaaagtttgaggtgcgatgctgcctttattattggttccggcagaaaaagcttgaatcagagaacgacggcttcctgggatggccaagttgggatggtgagtggactcacataccctgtagcacactggcacttgattgtgtcaaatctcacaattttaatatcctatctgtgtccagatgatgtgggatacctggccagtgtcctgctgagaactttacccatgggcaaagcccaggaagtctcaatagatgaagaggcatacatcacactggaaaaaatatccaaagccttccttcatagccctctctttccagagatgcagtcccttcattctgctttcttaacgtgcgtaaccacaagttgctccagcattctgtgttctggtgcccagcgtgactcaggtcttgtcagtcagcagcttccctggctttttgaaaaggaccacatggttgtgggtcattgggaaaacagatttgcaaaagctggacccgaaggtatagaacctagaggagaaattgcccagaacttactgtccctggtcaagagtgacttccctatccagctggagggagagcagttggaaagcatcctggggcttttggaagtgatttctgccttacagctggacagcctcttgccaccctatcatgtgcattattttcttgtgttactgtccatggccgtcaccaaactaggatgctcttgctcctcctcactggctctcaagttcttgacgacttgctaccaacttcttggttacttgcaaaaggggaaaagtgctcgctctgtgttcaagatcatgtatggtagtgatatttttgaggttgtactgacctcattgttcagagctagtagtaggttccttattgagatggatgatcccgcttggctggaattcctccaagtgatagggacgttcttagaggagctaatgcagatgctcatccaaatgaagctgagcttggtgctcaattttagaaaaatcaccgcattcctctctagttccaaaccatacacggaggcagcttcaagcaaacaattagaaaatcagaacccccagggcaggcagctccttctggtgtctttaaccaggttgtgccatgtcctgggacctttcctcaaagagcagaagctgggccaagaggccccagcagcactgtctgagctgctgcagcaggttgtgctgcagacaggagctgtgctgcagctctgctcagtgccgggggcccggggctggcgccttccctcggtcctcatctcatccgtcagcacgctcttggaagccgacctgggtcagcactgcagggatggaggggccgacatttcccaaggaagcgacaggacgctgctctcccatgttgccctctaccagggtgtttactctcagatactgttggagttgccagctctcgcgggacatgatcagtcttttcaggcagccttgcagtttttgactctgttctttttggccccagaactgcatcccaaaaaggactccgtgtttacctccatgtttcattctgtgagaagagttcttgcaggtaagatattttctcttgagctaattctgtgttatagaggtctggtttccactgctcccctttttggaactgggaataagtgaacacgtgatgtgttcaaaaggtaccacatgtgcggctgggtgcggtggcttacacctgtaatcccagcactttgggaggccgaggcgggcggatcacaaggccaggagatcgagaccatcctggctaacacggagaaaccccatctctagtaaaaaatacaaataattagccgggtgtggtggcaggcgcctgtagtcccagctactcgggaggctgaggcaggagaatggcgtgaacccaggaggcagagcttgcagtgagccaagatcgcgccactgcactctagcttgggcgacagagcgagagtctgtctcaaaaaaaaaaaaaagtactacatgtggacagtgagaagacctcccttctaggcccagcacccacgacttcatgccctctatttacattctaggcgtacataagcaattactgctacaacggtttccttgctttctgtgcaaacagcagcctcctccgtatgttgctctgcacctcagttgctcactgattttggaggttgctctgtgtacgtttatagttttgaaatctgctcctcttcagctttttagcctttaacttgtcctggctgcaatgagatacatagatacctgcatccttagtaggttcttatgtatcagactttcagtgccataaattgactttaaaaagatatgaaaatctgccaactttaaaaaagtacaaatcagagccaggcgtggcagctcacgccagtaatcccagcactttgggaggctgagggggcagattgcttgagtccaggcaacatggcaaaaccccatctctacaaaaaatacaaaaattggccaggcatggtggcatgcgtctgtagtcccagctactcaggaggttgaagtgggaggatcacctgagcccagggaggtcggtgctgcagtgagtcttgatcctgccattgtactccagcctgggtgacacagtgagatcctgtctcataaaaaaataaattaaaaaaagtacaaatcacttaatttcttttttttttttttttgagatggagtctcactctgtctaccaggatggagtgcagtggtgcaatctcagctcactgcaagctccgcttcccgggttcatgccattctcctgcctcagcctcccaagtaactgggactactggcacccgccaccacgcccggctaatttttttgtattttttagtaaagacagggtttcaccatgttagccaggatggtctcgatatcctgacctcattatccgcccacctcagcctcccaaagtactgggattacaggcgtgagccaccatgtccagccaaatcacttaatttccaaagagcctcttacagttccttgaggacaggactgtgccttccttagttcacccctgtccccccaccatattagggtgctgccaggtgcaagtgctcactggaccaaggctaaccttcaatgtcatcaaagtgttttagtctgaaggcagccttccaagcagcaaactaggacctcgtacacagcctcgaagcaagagagctcatgtcttcctgcacagagtcgacctttacagcccccctggtgaaaggttaatgggttactatgcagccgttaaaaatataattatgaaaactattatgaagacaagggctagaaatatctagaaaatattaagcaaaaaaagtacagtatgaaatgttaaatatgccacaattacagctatataagatatacatgcgtgcagacaaaggctagaaacccatccaaaaattaaaataattattgtattaacatgcatgtattaacatgcattgtattattgcattaacatgttgtgattgttgctattttcttattttgtacactttaatgttgcattttaataagaataaatcaaaatacttttctatgatttaattaaatatgccataagcaggggatagattataatgtttttggaggcccatttagagtttgttgaggttttcctctacagtgaaggatgattaagatttgttacctttattagggtatacaaataaaacacacttttactcctcccaaacaaacagttaatggaagagatttcttgtttcaagatggcacacatcacagttgtggggggtcttttcttttttgttttggtggtaacgaaagggctggggtcaggtcagtcttttgaggtgaggtctggaagtcagccgaatctgaccctcgttaatgtcacattaacgtctgtgttaagcacaccttaacctctgtgtttctgggtggagaagctgtgacgggtggggcacacgggcgtgcctttcggtacgtgagggttaaatgggttctcgcagaaagtaaagccatctggtctgcctgtgccagtgccagaactgaagtgccatgggccaaatcacgctgctgttgtctccctttcagtaacctgtctctggctggattgtggattaactgaaaggctttgatattacattgttctgtcttattgtgttagggtctcttttagcgaatggtgttcaccttcttaatgggggctaaaatagagtcttttattaagcctaattacagtgttctaagtgactggcccaagaaatggcagctggtggtctgaagctctgccctgtgccccttagctaaagagaatattgtgtcctccttttcctcttcaaccctactgagttgaggcaatctctttttttttttttttttttttgagacagagtctcattctgtcacctaggctggagtacagtggcccggtctcggctcactgcaacctccgcctcccggctttgagcgattcccatgcctcggcctcctgagtagcttggattacaggcatgcaccaccatgcccggctaattgttgtatttttagtagagatggggttttaccgtgttggccaggctggtctcgaactcctgaccttaagtggtctgcctgcctcagcctccgaaagtgctgggattacaggcataagccaccgtgcctggccaagttgaggcagtctttaagtcctaagtgtatgtccctggactgctggtaccttatttcctcagggacagagcacctcggtcacagtgtggtcagggttgggcaaggccagcctgccacactgtgccctcagctcatgggcctggggtgttgctgtgtccaggcctcttccacctgagctgttagatactgtccagggaagtgccagagttgtgagtgctctggaagaaatgccaagtgaggagtggcccaaggctttgggcagggagagggagtgtgaagaggcgccgtgcaggtgccccagccatggagttctccctgtgtccttaaggatggctcagaggtgggcttttgtaaagaatgccttctgacagcagaacagaggacctgaattcaattacagaaatcaacacttctaaaaatgcttcttggctgggagtggtggctggcatctgtaatcctgcacttagggaggctgagccaagagatcacttgaggccaggagtttgagaccaacctgggtgaaaaagcaaaaccccatctctacaaaaagccggtgtgggtagcatgcacctgtggtcccaactactccgaaggctgaggcgagaggaccccttgagcccaagaggtcgaggctgcagtgatccatgattgtgccactgcactccagcctgggtgatggagtgagaccctgtctccagaaacataaaaaaaaccaattaaaatgcttgtatgtttgaggctgtatcctgctctggagatgagtgaggtgttgattttggcctatgtaattaagtaaacagacattcgcacaaatcacagggtaaaggtgggggagacgccataaagcgaaccagagcgatgggactcggtggagaggccacatacaggccacgtgtgagtggcccttgaagggtagctagggcaggtggaaatgggagcctttcatgtgagggcactatgttgtgagctctgtggcctttttttgtttgccagccacaggagttggtgctgttatgcccacttcactgatgagggagttgaggttcagagagatcatgggtccagggttttacagcttgtgggagacttggacctaggtctttacctctcaaaagtcccctttcccccagtgctgtaaatagtaagcaaagacaggaaagcaggaaggtattctggcaatgtggaataggcagatggggctgaagcgctggctggaaagatgacctggggccagacgataaagggccttgagtgccctggctttgggcgttattgtgaaaccgtgggcccaaggacactggggatgatggggaacagctgggtgacttcctgacagtcatccaggcctgaaaagtggagctctcttagtctttctgactttcccatctgtttaaaataccacctactcttgcagccctaccgattttataaagaaacacaaagaaaatagagaaataaaatacagttgacccttgaacaacataggggttaaggcaccaacccccagcacagtaaaaaattccgtgtatatccttctgatacaattctattaaaaaaatcttgtattacttttgactctctagaaactaaactactgatagcctactgttgaccaaagccttgctgaacataaacagtcgattaccacgtattttgtgtatgtatttatgtattatattcttacaatcaagtaagctagagaaaagaagatgttattaagaaaataacaaggaagggaaaatgtatttgccattcattaagtgaagtaggttatcatcaaggtcttcatcctcttcatcctcacactgagtaggttgaggaggaggaagaggaggggttggtcttgcagtctcaggggtgctagaggcagaagaaaacccatgtataagtggatccatgcagttcaaacattgttcaagggtcaaccgcacaaagcaataatcactgtcttctgtggttcaggtttacctcctaagcatggctgtcgtcttctgtgtttgtgtgtgtacacacaatgcacaggcgtagctgtgcgtgtgagagcatggcatcacagtaactacgtgtacctgctttttccaccagtgcttatatcaccatgcccctaacttggtgatttttgatggcggccacagctgtgcgcagtttcatcctatggctacttggtagtttatttcacctgtcacatcttaacaattttggtttctttcccacacagatcctgaaattcctgttcaggtcactcaggatattgagcctcatttgggagccttgttcacccaaatgttagaggttgggacgacagaggacttgaggctggtgatgcagtgtattctccagggactggatgtcagtaacatgtggaaagcagatgtgcaggtgggtgccttctccctccttgtgtggcaggctcagaaaccacgtcggctcaaatgggaaaactgatttgagatgtggtgtcacccttaaaactaaacaagttctaactggtagagactctaggcaaagggggaggctgtgagagggagccctggcctgtgggacagcccaggctgcggcatagggaggccttagttttcaaacgggaagtttttcaaataacaaatgtgttgtcttattacgttaaatactaagtgttacacattcacaaaactgatccataaaaaagttaaattctgctcattctttgctgaagacctctcacaccatacttcttgaaacatgtggcctgattgggccatactgccttcatgccagcatttgagaagcacctaggttagcctacccccttcagttctgacagaagtcgctaatacagcctgcatggtgttgcatttgctgagtgcctttgcacagagctcacatgctgggatttgtttctctgaatgcctgtgggcactggactggtcagacatctcttacgcaaggaagaaggccacaggccacagagccaatggttggtggggcagagagtccagccaaggtctctggtctaggcatattctgcctcatgaatggcttattgactcctggtcatatacagcacactggtattgggtactgatttgggcaggagaggaaacaaacctaaatttctgtttggaccagttggtcaggagacttcccggaggaagtgaaactccagctgtgcactgaagaatgcaggggacttgattggggagcagaggtgaggggaagggaggcgtgcaccgtgcaggcagcgtgttgggctgccaggagcaggggatgtgcaagagtgagaagatggacagggagaagtggtgccaggggggcaggccctggtggggagatagcctgtaggtgggcaggagagtgggagtggagatggggctttggggtgtgcctagtcagagggagcagggaagggaagagagtgaaaggcagaagccaggactttggctagggttgtggggtgggctgcacagcattcggggagaaagggacggtgtgaggctgaaataggaactcactgacaatgtgaaatgcctggcactgggtctgtttgttcatataggcaccccgtaaaggtagggctctgcccacatctcatggtttaaaaccttatttttcaaaggggaagtttttcaaattacaaatgtgtggtcttattatgtaaaatactaagtattacatattcacaatactgatatgtataaaagttaaattctggccgggtgcggtggctcatgcctgtaatcccagcactttgggaggccaaggtgggtggattatatgaggtcaggagttcgaaaccacctggccaacatagtgaaaccccgtccctgctaaaaatacaaaaattagctgggcctggtggtgggtggctgtaatcccagccacctgggaggctgaggcaggagaatcgcttgagcccaggaggtggaggttgcagtgagcagagatcatgccattgcactccaagcctgggtgacagagcgagactcggtctcgaaaaaaaaaaaaaagttaaattctgctcactctgtgcttaagacctctcccaccatatattttgaaacatgtgacccgattgggtcatattgccctcatgtcagcatgtagcacccgtgaccacagcacctaatccgattgttttcacattttcctccagcccctcctatctgtaagcgtgcatcgttgctcagtgaagtaacagccagtgtcctctgcgtggacagagccttgacaagacgggctctctgtaattaggtcacagtgtgtgacccttttgcaattcactgtcctggccgatttacgtgcttgatttagtgaaatgctgctgaaagaccctgactttgccccagctctgctcatcttcttcacttccttcctgtctgcatgctgatgtgaagggtgtccctcccaggacttaaccccaagcaggccttgtccacctcccctgacaccagggctctcaatccactccaacgccacagccccagagagcagtcttcttccccaggcggagttcttaagggagaacacgctatctctgccgctaagttttttctctcttgccccaggctgttgtgtcagctgttacactgctgaggctgctactgaactgcccactcagtggagagaaagcaagtctgttgtggcgtgcgtgtccccagatagtcacagctttaacagtgagtaccctctggagatgtgtcctctagctcctcccctccctcttcctgtaaagacagaagtcagccttttggggtctgctgccctgtagctttatgcagaacgtgtgtgtgggctacttccaaagggcggtggtgagcaggatgccgagcttgtgtgtcctgcctgagcacattggtatcaacggttggagcagtggaagggaagtgctaacaagggacatttagtagcactgggaagcatcagacaggcagtaagaagagggatgtagtgataaagggaggctatcgtggaggcctgcttaatttttaaaattttatgttttattatttttttagaaatggagtctcactgtgtggtccaggctaaggtgaagtggctatttgcagttgcaaatgtagtgttctgcagcctcaaactcctggcctcaagtgatccttctgccttagcctcccaagtcaccaggattataggtgcatgccactgcagccagcttgtagatgcctatttaatcagatgataaaagaaggaattctggggctttctttgtccccacaaaatgttgtggttagtttaatgcactcatttatttgtaggagttgtatgtgtgtgtgtgtttaaggcctatgatacagtgagaataaaatgctttacaggatgggatagtaatgttgcagataggagtttattttgttacagtcttactcaaatgttaaaatttgtgtccagttgttgctaggctgtttgtttcactagaacagtctggttcagattgggactgcctcctgccctctaaaaaccctgacctgggtgttcttacacttaggtgcgaaggagcagtatctattttaccatcatactctgccctaattctagctgttgctacctgagacaattgccctgggttagcatgttcctggggcaaaagggtctaaaaaacagacttaatattctctcttgtttccaatttggctgctttgtcattttcctgagcatccgtgttggtggatggcaggggtcatcgtcaccgagcatgtgtggtgagcatcaggagaggcacgtgacccatgctgacgggcagggacagtgttgatgatgcgtgtggtaggccctcactgataagaacactgggctagaatccacttacgtccacccagagggtgtagcaggggtccgcacagccagaatacccagcagaacagtgagcattgtgagagacaggacccaaaaggcctcaccagggctgctgtgtatctgagaaggagggtcacaggtgagctgtcccaggttacttaggtaagactttgagctgtccttcctcttgggtctgttctctttatattctagatcatgaattgaatatctttcactagagctgatctgtaagaagtttagcaaatagtatttaacggcccacggaccacatcaattcattttggagcacagacatttctacctcagtcactcagagctgcagtgtttgtgttatttccttggggaattactttcatttttcctttattttattttgccctttagctcttaaaccgagaagcttctcaggagcagcctgtgtccctcacagtggtcgggcctgtcttagatgtcctggctgcactgctgcggcagggggaggaggccatcggcaacccccaccacgtcagcctggccttcagcatccttctcactgtccctttggaccatctgaagccgctggagtatggaagcgtcttcccgaggctgcacaacgtgctcttctcaatcctgcagtgtcaccctaaggtgagaaggagggtgagagtggcaggcagcttttcctctgcgagcagggtacttgaagtctgtagaaaagtggcagcaaaactttactgttgcaggataataatacaaataacgatttgctaggcaaactttctgttctagtaaatttcagagccaggtggtttctcaagcataaaaatgctcgaccttcatactgggtttgtgagcgagtttttcttcattggatctggtgctatgaatagtgtttgtatactacaggttgaacacttctaatccaaaatgctccaaagctcgaaacttttagagtgctgacatcatgctaccagtggaaaatcccactcctgacctcatgtgactggtcgcagtcaaaacacagtcaaaactttgtttcatgcaaaaaattatttaaaattattgcataaagttaccttcagctatgtgtataaactatataaagtgaaacataaatgaacttttaaattatatttagatgggtcccatctccaagatatctcattgtatatatgcaaatattccgaaatctgaaatctgaaacacttctggtcccaaagctttaggataaggcatacacaatctatactatttaaggaagctcattaaaaattactctgtttttgctcaccacgtctttaaataagccactcgcatagatcccttgctgggcttataattcaaatggatatagggaatgaagcatcctgagttccagttttatagtatgctcctttttaagttaaactgaaactagggataaatgtcccacagaaaaaattacagttcagttaacatttattgaacatttgatgtgttccacccctatagcaagcctgtgaaggaggcagtaatcccattttattgatgagtaaactgaggctcagtgccgccaaataatttgaccagtgtcacttagctgagtctaaaccttagactcaagacttgttatctttgaccagtgttcttttcatggtgccaccactgtatgtgtggctgactatgtatgtaggaactcatagatacgacggttaatgcatcgcttaatgacagagacttgttctgagaaatgtgtcgttaggcatttttgttgtgcaaacaccatagatcgtataatactttcacaaacccagatggtacagagtactgcacacctaggctatggggtatagcctgttgcttctgggctagaaacctacaaacctgtacaacatgtgactaatgaatcctgtagacagttgtaacacaatggtaagtatttgtgcatttaaacagagaaaagttccattaaaaatacaatcttataatcttataggaccactgttgtttatacagtatgcctttgaccagagtattgttttgtagtgcatggctgtgtgtcatatattcatgcacattcagatacttttaagtgttttgatgtcctaaggatagagacctgccagcaatgcagtttttaagaaaaatattctctggtaagctaaacactcatgacattggttctaactctaaagccttcccctgttaacaattgcctttgaccctatttatcttgtcagcatctttgttttaaaatctctctgctgatgttagatttgtatgtaactgtacaatataaatgcaatgcacataaattacaaactgaaattacaggtgcaggatttcatgaagttgatgaaagtaatactagaaagcagcttgattcttctgcaaaaccattagcaaatgaccatttagtggaattagatcatttaacgaatggagaaaattgacaaggataatgacatggtattacagtaaagaatgatgtgaattaatcatagctcactctcatctgttggggttgtgtagggaatctgatggatgatcacagcatcaacagtgtgcatggtaggcccacactgatgtaaacacgcagccagaatcctcttaggtgcatctaaagggtatggtaagaagtcagcacagccagcatacccagcagaatgatcagcagctagtgctgttccaagcactttacatggcttagcttgttcaatcctcatgacaacctatcatcctcattttgcagatgaggaaactgaggtgcacacatacaaagaaaagctagatgatttgttcaagatcataaggagccagagtgtgaacccagatagttccaaaaggatttgtgtgcttttcatcagtatgatagcaaaggattaagagagggtccttggggaactgggtgaaacgctggaatacttttgcaaaaacgacttctttctgaatatgctgcaaaaagtcagtaatttgacatgacgaatgtggtattatgctatcaaaaattttgttggacagattatgccaaagagaataatcccgacacttgacttactctctgttcactctcacacgtgatgcagcactgtccagcagtggtcagcagtggtgggtgtgtgctgtgtctccatcgtccagtatggtcaccactggccacagctgtcttgaccacttgaaatgtggccagtatgactaggaactgaatatttaattttatttaattctaattaatttaaatgtaagtagtcacatgtggctggtggtgctctgctggacagtgtgtggttgtgattcagacctaaagatgattgactataaaagaggcatgttttgtcatcaaaatctcattttcttttttttttgagatggagtctcgctctgtcactcaggctggagtgcagtggtgcgatcttggctcactgtaacctctgtctcctgggttcaagcagtttttgtgccttggcctccccagtagctggaattacaggcatccggcgccatgcttggctaatttttgtatttttagtagaaacagggtttcaccctgttggccaggctggtctccaactcctgacctcagatgatccgcctgcctcggcctcccaaagtgctgggattataggtgggagctgctgcgcccggctgaaatctcatttttcgagatgaagttttcaagcagaccttttcaccactattaattgagaggttttggtccctattttaagtgcatttgcttcaacataatctttttttttttgtaccaatgatacttgaatatattaattagtactgttcctattattgtttgtttctacccatttccagaatggattagcaccagcttagagtaaaaggtacagactcagcaaattccaaaccaggattgccccatagacctcctgaagttacgcagtgtgggttctctaccctagatagttaaaacaagggtcaaagagtctaatacaagatgggtgagcagtgacagcagcatgtccaggcgaaaggatgtggctatccctgggcacacacaactggtttgagtgtcccgatagactaggctaagaaagaaataagtatgagctcctttaaagtagaaaaacttaaataatcacgtatgtacttttacattctgttatctgtcattacaggtaatgctgaaagccatcccttctttcttgaactctttcaatagattggtgttttcagttatgcgggaagggcggcagaaggacaaaggtaatttggagtaacatcagacacagtttcaaatatattcatcatgaggtgtggctgctggccacatatgttactgaaaataaaactactcacttgtgtttaaataagagaaatgatatcaaatgaatactcaaaatatatattttttaaaatttcaaatggtcacattttatcttatccaaaacagtggatgaatcaggcatctccttattgaaatagttccttttctgggaaaaaaaatatcagatttaggaaatgtttactgagcatgtatatcatgtaaaggggatataaaaatgacttacaaccccattcctgcccttaaggagcttatagttcaatagggagatgaaaaggaacaggcaggtatagagcaatctcattttataaaagggataaggtcctgccgctcactgttccagcctcaccttggcaagggtgtgtttgtttactagggaaacactaactgccatatggcaatagcatatattatgtgtacaattcatttttcagctttgaagttgattcttgttgaatttctaatttgagggagacttttattattttaaaaattgctggccgggcgcagtggctcatggctgtaatcccagcaatttgagaggctgaggtgggtggattacctgaggtcaggagttgaagcccagcctggccaacatggtgaaaccctgtctctactaaaaatacaaaaattagctgggcgtgatggtggactcctgtaatccgagctacttgggaggctgaggcaggagaactgcttgagcccgggaggcggaggttgcaatgagctgagatcgcgccattgcactccagcctgggcgatagagcaagactctgtctccaaaaaaaaataaaaaacaaaaaaaaaaattgcatgaatttcgattttattttgcagtattttgaaattgcatagcatgtaccagccctgtactgtctgatgtgctaagcagtaggtcagggtgtcagctcagaggctctgggaccataactcaactcggggtgtcagagaagagcctgtgaccgtagttgtgggccgactggaaatacaggagtggtgctcagcttctctcccaccattgtggttcagttttgtagacctaagcaataggcttttaaccagacatcttttgagaaaaggaaaagggcattgttaagactaggcttcaattcctctgcccggttttgggatcaatcagtggcacagttagatatttcgcttcttcctgtatctggtgcagagcacgtcagcttcatattgtgaatcgatttaggagcagcattagtaaacaagtttcccctcccatgccagcctcagcaagttggtggtggctgcctacagttctgtgtcaaagcctctcccatcatgtctgagctcagcaaggaggaatctctgttcttgtagtcatgtctgcctggacggaaggccggggccttgctcagcagtggtggagcacagcctggtcacactgccacaggcatgtcctttgtcatgtatttgaggaagcacaggagcacatcacacttctgggactctgtgctgtgttcatgtgaaggtagcttcgtcatcatatctgctaagacctggttctcagacacattcatggcttaactgagtagagttttaactattttattatctcttttattggtatctaatatgctctttctaatgagcatgcattaaattggcggccgaaataacaagtgctatgtattcatgttgtaaatagcatgtatatggtgaacagtctgaaaagagaagaaacagtcaatgttagatattaaagcatatcactaaagtatattgtctgttgaaatgctacatgaatgttaacagttgacatcatttcatacaattacattgatctagaaaaattacatctataaaagatgtctgtatgcttattcacggtcttcaaaaaagatatgccttctaaaaatcaaatttattgagttatatacaatgtatgcataacaaattgcttctgtttaaagtataaaatttaatgggttttatgtatatatgaagccgtccccacaatcaaaatatagaatattttccatcatccttaaaagattcctcttgtttctttgcagttttttctccactctggtcccagccccagtcacccatctgctttttgtccttatggatttgtttgtgttttctggagttttataaaaatgtgcctaccattgtgctgaatgacagcagggaaggtgctctggtgtgtgctagaacttccccatgagctgtaactcaagctgtggggacactcatgcaattaggattcttgggaggagtttgttaagaggccctggacggtcctgacaccatatggtaggaaaagaactaggaatcagaagtaaatctaagaagacagtagaatgtctgctaatgataattgagtcctatgtctgtccacctataaaaggcacatacacaaacaatttctgaaatgtaaggaggcaaagacataatttagggtatctcattttttaaatcatatgatgtcggtagatgattttctccacttaagataattttcaatttgttttccatttgcctttattatagaactccatcttggtgttttttttttttttttttttttttaagtaatcctagatttcatcctaaaaatcttgattacttttctggttagactcttaaaaacacccgagcactcttgagttttttaaagtgtccttccctttgttgtgtagataactgtttggacatatctgttctcccttattctgtctgcaaaataagccaattaaagagtctgggaaaacatgtaacacttgagataattttcacccatattaaaagtctaacatagaagagttaaaatgtgctgtttttgaactaattggttgggaaacactttgttgtctgtaggaagcatagatgacctgcctacggtcctaaagtgtgcacgcctggttgaaagaatgtacagccacatcgccgcacgagctgaggagtttgctgtgttttccccatttatggtggcccagtacgtgttggaggtacagaaggtaaaattgggttcaatgtctttcaccaagtactgtgtttatggtccttaagcagggtttctcaaccaaaatggcaagcggtgttctggatctgacagttctctgttgctgtgtgcaagttttagacagggttttgctctctcactcaggctggagtgcattagtgcgatgatagcacactacagcctcgaactcctgggctcaaatgttcctcccgcctcagcctcccaagtagctaggactacaggcatgtactactccactcagctaatttttaaatttttgtagagatggggtctccctatgttgtgcaggctggtctcaaactcctggcctcaggccttcctttctcttcagccttcccattctctggagtcctgtctagttcaaggtgtttagcagcattcctacagggttattgtaaggaccaaatgaaatgacatacagagggctcagtggtgccttgtacacagaaaatgctcgattatctgtcttgctctagcacaaacttcggggtctatttggttagtttcttgagttatataaaaggagaggaaatgttactcaggtccaagaacaggagctctcataggaccaggcttaatggagactagaaagaggagttctagacctcaggattctgggatcccctcagctgcaagagttcatgtatctttactctggcggtgtgtcactcatgtgactcagctgctctcagacactcaaagtcgatgacaaggtggagatacaggtagttgttaaaatagacagattaagaaaaaacatgtttgtccaaattaatctgactttttgattcagtgttctggataattcactattcaacagttatcttttttctttttgagatggagttttgctctttctcccaggctggagtgaagtggtgtgatctcagctcactgcaacctctgccccgtgggttcaagtgattcttctgcctcagccccctgagtagctaggattataggtgcccaccaccacgcccagttaatttttgtatttttagtagagacagggtcttgccatgttggccaggctggtctcaaactcctgacctcaggtaatccacccgccttggcctcccaaagtgccaggattacaggtgtgagccaccgcgcccagccattcaacagttatcttactttggaatgtcattatgctattttcaaaattccacaggatcctgtgtgacccatagtaagttcactacagaactttgtaaatctatgctgtataaatcttggtttaaattgactgtcataggcttgagcaaagtgcggtgtattcttttgactgtcttcttctgtatgtatagatatacatttatattgtgttcaatctctctgtaaaatacccatttcccctttgtaaatcttgtaagaacaatagtaaaatcacaagtaagcttgttagggtagaggtgtcagcatttgtccagggaggctgggttgaatgggcttccttagaaaacctggagctgcatcacttttcatccctgctcctgttttagatacatctagaactactaaataatttctaccccgctggccttgctcacctcggcaggtggcgatgcctgtcctgtgggtggggacatgggggcagcctggccatgtgagtgcacacaccttaccgggtgtggagcccacacctggtaagtgttgtggatcttgagaacaccccttcacgttgtcctttgaccaagatgtgggcttgtagtttggtttcattgcagttatttggcctttttatggaatcttagtatttcccaagcacaccagtcgttaacatgtaagcttttgatgaaagaaaagctggcgttattttctgtcttactgaataataaaatgagacatagtaatatcacttcactaagagccaagaagagaagcagtaatttgaacccttcagtcactaattattattctgaaatttactttatgaaaagcctctggcttcctggcctcattattcatgtctaatttatgctcattagttatattttatttttaatcttgaaagccaaaggctttgggaattagctagggccatagcctcccagaatccactggcaccacagtccatgttctatctttcattttgtttttaaattcagcaatgaagaaaatattccatatgcattagcagcttctactgagagagccataaatctttctagaccagcgtgtttaagtttaattaaataccagatctaatgctaaatagatctcctttgcattttccttgtacttctgcagagttgagtattgctggtgggacctgtcagtagtcagggaagacgacctggtgagatgtgtcagtcaggagaaggggcagctccagaggcccgcttgtcttctttcctccaagcagtaatgagtccccatggaaacatgcagggaaattatggttactttcatctccttttttacctgtagagcaaatttacaatgtccctctacagatgctcctggacttaggagggggctgtgtcccaataaagccatagtatattcaaaatatcattagttgaaatgcattcagtacttgataaacccatcgtaaaagtgaaaaaatcgtaagttgaaccattgttaagtccagatgctccttgacttaatgatgcagttatatctggataaatctgttgttaattcaaaaaatgtcaagttgaaaagtgttaagttgaaccgtcttaagtcaggaaccatctgtatggtgatagcttagaataagtagtttgtgctgctcatcttatctaaggttttaaaagctacttagtgatgttttcatttgttggccagtgatcttagtgttgtagaaattgactcttttcttgttttataaataagttatctgaaacctaaagatttaaagtggttgtgttgtctaaaacctactggccttcttactacccccagagctctttgcaagaggctgtctagctgcattttcactactgagaaactgtgtaagtagttcagagcatgggctctgggctcagactgcctaggttcaagtcttagcgctgccagttattagctgtgtgactttggggaggtcactgaacctcattttttgcctttggaagtggaattatttatttagtaagtgataattaaatgaatgaacaagtatgaataagtagtccacttacaaagccctcaccctgccagtatgatcaaggactttgtgtttttgtctgtttttcgttttgttttgtttttttctttccctcccaattaccttgctgtaaaattcacagacacgccattctaccttcggtccttgagtgttgctatcatctataaaatggtaaaatttaagatgatcacttgtcagaaatttctgaactattacatgaaaaggatcataactttgaagagtagcatcgtctgagagacagaaacaaattgcctctttaggaatgtacttcccagtggttgccttcgtgaatcagttcttctggttaataaaatatgtcctcattagaaactgtgtttgcagagacacattaaccctttcaggttatcagggtagcaataaatgatcagccaaattccaggcctgtctgctgatgctctaccactgctttggtttttttctacttcttaaaagtaatggcaaaatacatctagtataaggtgaattttaccagcttaactgttttatgtgtgcacttcagtagtagtatatacattcttatattgtgcagccatcaccaccatctgttcccagaactgttcattactactgctttttagtttcagttactagggtttcaaactctgttcagcccacatttagttgaaacctgaatggatgtggtaagtgtgaagagaacctgttcccccagccttttaggttggtttgatattagtctgagtctcttctctggaagtttgggtggagcatcagatacagccaggttggagctggctgccacccacactcctgtgctccagattttaggtaaccctgaacttcaggggagaagtgcatctttagggatgaggaccagttcaaccattccagggctgttaggaattaagtgcatattgtgctgttcttgacataaataaaaaaggaatctattaaatggcaatcatgaaatcacttctgctcttgggtgatatgatgtgatctaattactagtgtaggcttatcagtggtctgttttggtagtttcagagcctgcctgctgccttgctctggggtgagatgggggtcatagtgttatggtgaacgtagttgtcattgtcccacagggttggcatagcttccaaggtgattgacggtgtagaagaatttgacacaatgggcaggcagcttatcttcttataaggtttttaaatttaaagactccagttttttaaaatgcccctggtaaacatgtaagcatcatttactgaacagcaaagccagccttttgctttcatggagttttattccaggtttgtgtttgcttgagttagcttctatttccccaaaatacaaactttaaaaatatgagtatttaaaggtttgacttagtaataaaattatattttaaaagtgaatgtcgatttttttctcaatttggaggtcagtttgaaattacttgttagtgcttcccaaggcattgttggcaggtggtgcggcttgatctctgcccccaattgttctcacagaggtttgcctttttcctcaggtgaccttatatccagctgtgaaaagtctgctgcaggagggcatttacctcatcctggacctctgcatcgagcctgacgtccagttcctgcgggcctcgctgcagccgggaatgagagacatctttaaggagctctataatgactatctcaagtaccacaaggccaaacatgaaggagagaaaagatatacggcctaaggctatgggacagaagtgccgccagtgacactgtccagaggctttggctgcatggtctgaaagagctggagaatgaaagacttaagatgttctaattcgtagtattggtatacatagaaaatcctttggggtttatgtagtatattttgatgtattttacatcgtgtttttcttactattttttaatacatagttttatgcagtaagtattgcaatagaatcctgaaaattgaccctgggatgagattaattcaatagaaaaattgctgactcttgggacctttctgtgtttggttctcgtcttggctcagtggtttggtgttccctcgtctgcactggaaactacataaaacttggctttttactttgggtacatgggcgtataattcagccctgtttaaatatacttgcctttcaaattcttcaagtaacatgggaagtattcttgaaatgtcacattttctgccttccctctaagtatgctttctgaagaagtcagggaaagttagagtctgtggcctgaggtgtctgctctgggtggcgatagtgggcacctcaggcaggtcggtgacgtttagcacaggtgccagggctcctgcctgctcctcctgtgttagctctgtgaagttcatttaggaatttttttttcctatgcagtttaagaaataatcctaattgttttttcttattacctaagcaatatatttttattatagcaacctcagaaaagaaaaataaaaggataatttaaaaaactcattcatagtctcagttacccagataacctcggttgtcaccttggagtatcttgttgtagtccctttactatgtgtatgtatatagatgtgcatataaatatatatagtagctaaattggatcataaatgcatttttttaaagttaccttttttcctgtgtaatattttaagtaactctgggtcagtgaaaacattcgacatatattttttttggctgcatagtagtccattgagtagatattgttgttttatttaataagtacaccatggttagacataggtatctgtccaaattcccttttatagatggtgcttgcagctgaattattttcagaagatgaattctcatgagttgtattatttgtcagaaaaccacatcatttttaaaggatttatataaatattgccaaattgccccctagaatattactaatttattttcctactagtgagtcaactttaatattattgatttttgtttctttatgcttccttgataggagagagatgttattctgttttgaatttctttaattactaagagattatacatttttcacatttaccatttttatttcttatgtaaattatgtttatataattatctttcttctgtaatagcacatttctcaattgggatatttaccatttttcttattcactgtctttgggggaatcatgttggaattccctttttaattagttcaaaatgcagacttttgaagttatttgaaggatcatccttaagcaaaggctttttttttttaacactgtattttcaagcagatgtgattggagcagacaatataaaatgaatgtctttgatacctaagagaaatggcccttgttttacg

SEQ ID NO: 12844 - DNA, 1459 bp, Homo sapiens
gtgaggtttcaccatgttggccaggatggtttgatctcctgaccttgtgatccaccctcctcggcctcctaaagtgctgggattacaggcgtgagccactgcgcctagcctcttgtggctctaatttattatgtagtactctgtggtctgtatattaatgtcttgcctttatcttttatattatatggtaaaaccctgatttttgtattttgaattttcttgtttaattgtacacatttttgtactggtatatcaatagctaatggcctctccccagaccaatgaaattggcatctttttagggggagagggttagattgggtctcaggctctggaattttttaaaaagctcaccagatagtgctggtgtccagctagaattttctttttggattccacactaaaagcttaggccataaaagcaaaaataaataaatggaatgacgtcaaactgaaaagcttcttcaaaacaaaggaaacaatcaacaaaatgtaacaacctatggtctgggaaaacatatttgcaaaccatttatctgataagggattaatatctaaaattcatgaagaactcatataattcaataatagaaaaataatctgattagaaaatgggcaaaagacttgaacagatgttttttcaaagaagacataaggatggctgacaggtatatgaaaaggtactcaacagcattagccatgcagaaatgcagatcaaaaccactgtgggcgtcacctcacaccccttagggtggctgtcataaaaaagtgaagtgataacaaatgttggcgagggtgtggagaaaatggaccccttgtacactgttggtgggagtgtggattggtacagccatgatggaaaatagtatggaggttgctaaagaaatgaaaaatagaagtactatatgacccagcaattccttatcgggcatatacctaaaggaagtgagatcaccttataaagatatctgcactcccatgttcattgcagtgttatttacattagccaagctgtggaaacaacctgaatgtccactgatagatgaatggataaagaacatgtgatatgcatatataatggaatattattcagccttaaaatgcagatactgccatttgccacaacatggatgacctggaggcagtatgctgagtgaaataagccagacacaggaagacaaatattgcatgatctcatatgtggaatcttaaaaaaaataaaaaaaaagagtcaaatatacagagtgaataaaagagtgggttaccaggagcaagtgggtggggaatgggaaatgtaggtgaggggtaagaaaatagcaagtatgtaggatgaaagagcctagagatctaatgtgtaacatgtagctaataagaggactgtagctaataaaattgtactatatttggaattcctgctaaatgaatagatttttagctgtccttgccacaaaaacaaacc

SEQ ID NO: 12845 - DNA, 1239 bp, Homo sapiens
gggggagtaattcttagtcccatgttagaaagggggacgtgggacagaacaactgttcacacgtgaaatctagtgattggccaggctccgtgctaggtcttacattatcatttaattccagtactgtcctgagaactaagcattaggagaagcagcatggggctcaacagtgaagtgacttgttccaggcgggtcctcaggagtggctgtgcagccccagtcacttttcatcacaccggagagggacgcacaaccccagtcctgtttagttgcagatataccgagaagggagagcccacaccgaccttaagggcacttgggccctgaatcctatgcctctcgttccactgcttctcagttgccctcctacctggctggccaggtttggagtctctctcccctgctctggcattccagtcttggcctgaagcacgctatgcctctcatacagtctgccttttctagggtccaagcagcatcccaagttctgttgagatgcagcttgcagtccaggaggacaacggtcacccccatcttcccatgtttttcttgctttaagccctcccctaagctttcacatataatcaccaggggttcagaaattgtcagccagttctccttatgctttaagtagattttcttggggccagatgtcttgaaaaacgctctcctgactcagcagttcctggaatttttggcctatcatttatctcactgttctgagtttacttgtaagcctcttcgcttaatgtttgaatcaagatgagcagtaataacagcttcttgtgtaccaattactcagaactcacttaaattgccttaacactttttaaatgttcttacacatttgaaattctttagggagggatttccagaactttcctaaatttctccacccatggcatgacagtacttagaggggcaagaagttcaattttagaataagctcttctgggcgcgatggctcatgcctgtaatcctagcactctgggaggccaaggcgggtagaatgcttgagcccaggagtttgagactagcctgcaatatgcgaaaccctgtctccacaaaaagccagacatagtggtgcatgcctgcagtcccagctacttgggggcgctgagttgtgaggatcacctgagcccaggaggcagaggctatagtgagccatgatcgtgccactgcactccagcctgggtgacagagtgagacgctgtcgtctcaaaaaaaaaaaaaaaaaaa

SEQ ID NO: 12846 - DNA, 2719 bp, Homo sapiens
ctgcccctgtgggccgcacctccaggacctgttcaccggccaccggttctcccggcctgtgcgccagggctccgtggacctgagagcgactgctcacagaccgtgtccccagacaccctgtgctctagtctgtgcagcctggaggatgggttgttgggctccccggcccggctggcctcccagctgctgggcgatgagctgcttctcgccaaactgccccccagccgggaaagtgccttccgcagcctgggcccactggaggcccaggactcactctacaactcgcccctcacagagtcctgcctttcccccgcggaggaggagccagccccctgcaaggactgccagccactctgcccaccactaacgggcagctgggaacggcagcggcaagcctctgacctggcctcttctggggtggtgtccttagatgaggatgaggcagagccagaggaacagtgacccacatcatgcctggcagtggcatgcatcccccggctgctgtcaggggcagagcctctgtgcccaagtgtgggctcaaggctcccagcagagctccacagcctagagggctcctgggagcgctcgcttctccgttgtgttttttgcatgaaagtttttggagaggaggcaggggctgggctgggggcgcatgtcctgcccctatttcccggggcttgccgggggttgcccggggcttttggggcatggctacagctgtggcagacagtgatgttcatgttcttaaaatgccacacacatatttcctcctcggataatgtgaaccatttaagggggttgttactgggctgtgtgagggtggggtgggaggggcccagcaaccccccaccctccccatgcctctctcttctctgcttttcttctcacttccgagtccatgtgcagtgcttgatagaatcacccccacctggaggggctggctcctgccctcccggagcctatgggttgagccgtccctcaagggcccctgcccagctgggctcgtgctgtgcttcattcacctctccatcgtctctaaatcttcctcttttttcctaaagacagaaggtttttggtctgttttttcagtcggatcttctcttctctgggaggctttggaatgatgaaagcatgtaccctccacccttttcctggccccctaatggggcctgggccctttcccaacccctcctaggatgtgcgggcagtgtgctggcgcctcacagccagccgggctgcccattcacgcagagctctctgagcgggaggtggaagaaaggatggctctggttgccacagagctgggacttcatgttcttctagagagggccacaagagggccacaggggtggccgggagttgtcagctgatgcctgctgagaggcaggaattgtgccagtgagtgacagtcatgagggagtgtctcttcttggggaggaaagaaggtagagcctttctgtctgaatgaaaggccaaggctacagtacagggccccaccccagccagggtgttaatgcccacgtagtggaggcctctggcagatcctgcattccaaggtcactggactgtacgtttttatggttgtgggaagggtgggtggctttagaattaagggccttgtaggctttggcaggtaagagggcccaaggtaagaacgagagccaacgggcacaagcattctatatataagtggctcattaggtgtttattttgttctatttaagaatttgttttattaaattaatataaaaatctttgtaaatctctatatacatctggtcattggaggttccagttataaacccatcttagttccacccctttcccctcaaagggggagcaggggtcaagtgaccccaacccatcctgccagggcagggcctatcttcctgcctctggaagacttgttgcaggtgggtagtgggtcagattccaggtaggatgaactgggagaagctggcaccccaggtctggagggggctggggtgcagcctccagctgtagctgcctcctgccttccgaaggcagaaggaatgaaagatgcacattctgggctgacgggcatggctagcaccatcctaggccacccacgaggggctcattggcatttgtcgtcgctgtcggaagggctgccctcccgggggaggccatgacgggagtggggcccccagagtgcatgcacctcagtggtctccgtgtcactgctgctggtggcactgtctcggaagctggcgaggggcggccggactttcacaccctgtgctgtgacagagccctcgatggccttccggagctggaaaggtgagagggacagatgtctggacccagatgtcagactcctccccgccttcctccccaggtgagctggacataagcctccatgactttttggaagtggagcagctttggaggccaccatcacctcacctcctttagagtaacgattccaatgagtctgccaatactggtgacataagcatggtccactcccagcagtgagaagatagtgtgagtctgcagtgtggggagaaaagcgattggacttgatggacgaggggcagctctaaatgacaggccacaggggcccaggacaaggttggtgtggaataggaggggtgccccagattgggagggaaggagacaggactgctggagggaaaataataacaatcgtaataataatgagaatgtttctgtgtccaggcctcaggaacttgat

SEQ ID NO: 12847 - DNA, 224 bp, Homo sapiens
agatcgagaccatcctggctaacatgggaaaccccgtctctactaaaaatacaaaaaattagccgggcgtggtggcgggccgcctgtagtcctagctactccagaggctgaggcaggagaatggtgtgaacccaggaggcggagcttgcagtgagccgaggtcgcgccactgcactccagcctgggcgacagagcaagactccatctcaaaaaaaaaaaaaaaa

SEQ ID NO: 12848 - DNA, 4127 bp, Homo sapiens
cagagcgacctgcgggttgggctgagtctgtccttgaggaagatgcatcggagcttgagcctgccttctccaggtaaccttctccagttctcttctgttttcaatccagcccttgcctaggtgtaagagagagattcccattggttgtcctgaggttgacttgggggagcactttttgataagctctttttcccctaatatctgctaaacttatagagggttatgtaggtatgcagaagccagaggtgacccacccatgttactgcaggtgaaaaggctatgtactctttcctcagagggtaaagcctcacagaagaggcctgggccccagacaggggtacattggggatactttaccaggtaacaagcagatagtgggggattaggagtgttagggagtctcagtacaaatgtgtgtttctaggctaattttagctaagactgccagccccttcttagcatggggaggaattggctgagattgagtcatctgagatcatccttttaaaaaatcttcataaaacccatagaaaaagtgatctagggaaaatttagtaatttttgttaactaatgtttcccccttcatccctgtaggactgtaggtaccatccagcactgcctccacctgacgtcagtatatacccacttcctgccccagcgtggccgcccagaggtcactacaatgccattgggtcttggaatgacagtagattacatcttcttctcagctgagtcctgtgagaatgggaacagaactggtaagcctgatggatcctgggttcctccacccccaggtccctgggaacagctaatggtaggtcaggcatttggtagcatgtcttcagctgctgggatttaaccagcaaaggagcagatttcatacctcccttgcactggtcatccttatcattctccccataggccacttgcctgccttgtctctttttacccttgcagcattaaagagaggagggtaggacagtcactcccaatccccattttagaggtaaaaatagagatctaggaattggttgagtttgtttaatgacagccactgaatgagggacttggttaggtaagagaccttattttctgtctcctctccccataccagtgggcacagtatagcaatctcccagccccatgcctgtattgtgtaaagaatgtttctttttggccaggcatgtgtattactgttatggccaggcacgtgtattactggttcacaccggtaatcccagcactctgggaggccgaggtgggtagatcacttgaggttaggagtgagaccagcctggccacatgatgaaaccccgtctctactaaaaatacaaaaaattagccgggtgtggtgacggtgtctgtaatcccagctgcttgggaggctgaggcaggagaatcgcttgaactcgggaggcagaggttacagtgagccgagatcgtgccactgcactccagcctgggcaacaagcgtaaaactccgtcttaaaaaaaaaaaaaaaaaaaattagccaggcatggtggcgggtacctataatcccagctactcaggaggctgaggcaggagaatcgcttgaacccgggggtcagaggttgcagtgagctgagattgcgccactgcactccagcctggacaacgaagtaagactccatctaaaaaaaaaaaaaaaaaaatcagattttatatagaaaagctggatctctagcttctcttggaaaatcaaaagatcttataatggtgggctctccagcttgccccagttccccggaactcacctgtctttattcgttgatgatattatggagtatctctgagaaaatggggcctcctcagccagatgctgcaagaggaggtgaggggcagtgggcagccaaggggatgcagcctgcagaaggcgttcccaaaggactctgccactgcctgcccatgcagtgtggctgcggctgcttttacccattggcttctgctttgtgccccagatcacaggctgtatcgagatggaactctcaagctcctgggtcgtctctcccttctctctgaagagatactctgggctgccaatggcttacccaaccccttctgctcttcagaccacctctgcctgctagccagcttcgggatggaagtcaccgccccatgacagggctcccaggggaagagagcttctcttccagaagagctcactggatcagagactgtggaaaaatcccatgcatctagaaacttagatccaagaaacttacatcccctcccttccccctcctcgttccctttttcccacggttagactttctccaggcctggctgcgttctctgcctgtggtccttgccccaccccagcctcttcctaatcctgtgccacacactcagtggccctgggagaggcagaaggggggctcccccttccttccatgtatccagcgctcccccttgatttttaattaccagggttatgggagttcttgatttcattggttatttgctttcaggccgtttcttgatgtaccttctgacctgaccttttccctgccttcaggacttctgggcccagccctcttgccaggcatgcatatgtgagatatgcatatcatgtatgtgtcctcttggggtgagacttctgcacagccatgcctgcctctgaccagtccacttttcatgttggggctgtaggcctggggcaggttcagagtctacccaagtacctatgtatgagcaggcagcagcagggcatggccccatctctccttttagcctctgtgtttcattaggcattcatcctgccaaccagggcaggcccggcgtctgggctctgggaacaaatggggcccacatcctggagtggcaaattttgggggatgcgctacctgtcccagctggccctgtgcctccaacccagagctccccacagacctggtgtaatttcacaagggccatccctttccccaggcttccctgagggaggcggaagtttgaacccttatgtggggttcattgggctagggtagtggtatgaggtttaaaactatttaaggattaggaggagaaagagtcttcaggaaactcttgtttcactggactctgcagcctgcagaactggggcaagggtaggagttccagtaggggaaggagcaggtagactcttcagctgcctcagctgggactgaagacctaagctgattctctttcctctccactcctaagaagcaattttctgttcctctccttccaccactttttactttctgctatctcccatctcccgcttcccttccatttcctttctagaaaaccctggtatttagctcaggccaaactgcctcagcagaaaggtggccttggacaaaactggtccaagaatttgaagtggcagtacttgcggattggctctgtccagcaaggcctcagctgcttgttgcgtctgctttccctcccctaacagaagggtaccctggcttattcaggggactccttagtccacactgtgtcacctgcatgccttaatctttcattgctggggtgtggccttgggagatcctgggccagcccctccacacatctccctaagtcagagtggctgctggccctggtagatttgacttgctcttgcctcactcgacctccaaagtgggactgaagacagtggtcaagagacttgagttcgggacagtaagccaggggttaaggttctttcctttttttgaaagccaaagacccagtttgcattgtgctgctgcattcatggttagaagctttccatgcctaggttctagggaatttatttttctatgtgtatatattttcaaactttgtttcctgggtactgggcatgtgcctgtctgagccccaggtctgtctacaccccaccattcattctgtctgtctgttccctggacactgcctaaaagggtctcaagacagtgccctgtgggttcctaggactagggcccatcactgttctcttctgctgggaaatgcagctttaaaatggctaaccacagcagagggcagatgcttgatagattatcttttccttgctttcttgtttctgttttgaaagtgaaatggggttttaaattgttatttaaactctttttccaaataaaggtttaccttttttccccccaa

SEQ ID NO: 12849 - DNA, 973 bp, Homo sapiens; identical to SEQ ID NO: 8360

SEQ ID NO: 12850 - DNA, 3386 bp, Homo sapiens
  SITE (1321): n equals a,t,g, or c
  SITE (1653): n equals a,t,g, or c
aggaagggctgcactttggcgtagagtacataggcatgcaacatgggagggcaggccttatgaaatgtatatacagaccccttggggtgaggggccccggccaggaggcactgagcaagggaggggtccatctcccgcctggccgggagtggggctctggggcaatctctaagggttgcatatccccaaggagaggggacagctgccactcctgcctctgttatcccaacccaaaccggagagggtgctcagcaagaacacaggtcccataagccaagaaggtgttggcatccctgtcattgaattcaggggtccaagaactgtttgcataaaatatcattagacctaagagatggtcaaaggcacaaagtttaaacatggggggggcgggtgttgagaggggtctgggataccctgaagcccagaggtgtgatttgttcccccttgcccagaagggtgactgttccactgggcctgtcaccacaggacattttccatgacaagcactcaccttcttggggaaggggcatcaggttggcacaggaaaggcccaggtgaggggccactctgtacattaatactttggtgattaatgtttggggagaggcaggattctcacccaggcttttgactcaaaccctctcactcagctggatatgaaacccagagtccatgctactcccagctctgacacaaggccaagcccacagaacactcccaaacgaggtcccgagagttagggaatagggtggaaaggattggagggcatcttctggaagagagcgctagggcagatcacagtttccgctccacaggttgctgtagacacagttcgctgcccgcagagatgatgggcaagtgattgtccatgtggtagctgataaggtgactgacactttcaaagcggtgatccttagtccgaacctgggagggtgggaaggaagaaggtcaattcaggtgaagagtcaaataagacctcagcctccaaggtggaagagggtgaaacagacaagaggcttgaaggcaggagaaaaaaatggtgggggagagtgtggcctgtcaatcctgatcattgaggcttctctagaaagagacagttgtaggaatagacaggtcagtgaagtgagaaaaggcaaaggcgacatcagccctgaaagagtgaagctgagagctatatacccctttcttgacctggaggaagttggcatgtctcacaagagtatacacagtgcaaaaaaagatgtggaggctgggcatggtgggtcctgtgcctgtaatcccagcactctgggaggccgagggaggcggatcacttaccccnggtagatcaagagcagcttgggcaacatggcgaaaccccatctctaccaaaaaaaaaatacaaaaattaaccaggtgtgccaccacaccgcagcctgagtgacaaagcaaaaccctatctcaaaaagaaagaaaggaagctgagattactgtatacaacagacactagtttttttgtttccagacagggtctctgtcacccatgctaaagtacatgggcgccatcttgctcactgtaacctccactcctgtgctaacgatctcacgctcagcctctgggtaggtaggactacaggcatgtgtcaccattcctgactagagacaaggtctcgntatgttgcccagctggtcttgaactcctggcctcaagcaatcctcccacctcagcttcgcaaaatgttgggattacaggcatgaaccaccacacctggctaaacaaggaaagttttgaagaacagtgaggcagtgcagataagagaaagcacagtggtctgagtcctgagtctggggagctggagaagcccttggatcttcttacaaaaggaaacttgcagtgtctagcctctaaccatctgacattgggcatcacaacctcttcagggtggtttccttatttgtcaaaagaggggcacagatgagatgactgccttctagctctgataagcttaaggcttggggatttgaggacgggccaggactgtatttgttttgttttgttttttcagacagagtctcactctgtcacccaggctggagtgcagtggtgtgatctcagctcattgcaacctctgcatcccagattcaagcaattctcctgcctcagcctcctgagtagctgggactacaggtgcctgccaccacacccggctaatttttgtatttttagtagagacagggtttcaccatattggtcaggctggtctcgaactcctgacctcaggtgattcacctgcctcagcctcccaaagcgctgggattacaggtgtgagccaccacgcctggccctgtgccaggactataaagaacatagttcacgctaagggatgagcctctggtatgaagatgccagacactttaaagagcaagagaggcccatagacagctgcccagcgggaatgtctacaaagcaatgagggaaggaagagggatacactgtagggtactgtaccttcctttttgccacccctcacccacacatttgccacactcaccacaccctcagggtccaccagtagcaaatgcttaggctgcccactctgcaagccagtgagcacatactggccaggtgtggtcgtgctctcccgtaccaggaagtccccattgaactgcagcagtgcctcagcctcccgccggctcagcttcccatggaaccagggctcccctcggagctgctaaaccatagacaccctactggggacgtggaggcacgcgcaagagcatcttcgaagggctctggaagtatagagggagggtgaggggaagtagcaggcacaacacacacccaagacccagacttcagggaagggaagtcaggaaggaaagagcagataggcaggagaagggccagaaccaagtagaaaggtggggatgcagagaggagagagacgagcactcactcatgtcaaacaggtcccggggtgcactgccattgatagcaggattggggggcccagcaccacccactgcttgccgggccttgtctaggttctggacgttgacataggagggatcatcaaaaagctctctgcctgctgaggaaagggaggctctacagtgatcccagccctgcctccaacactccccagctctgcctatctcggctcccttcatacctggacagggtggtggaggtggcatctgtttgcggacttctggatctcccccaacaggctgtcctacaggctgcagggataaaaataaggtgagaccagaagccctaaccaaccactcccaccctagccccagcccgcctccatccaagcaacttaccaatgtagctcccaagtggctgggggtctgggcattgggtgcagtgggtcgagcagccctggagcggcgtcttcccg

SEQ ID NO: 12851 - DNA, 3321 bp, Homo sapiens
cctgagtatttgacttccttcgcttcttttctggactcttcatttgcagacctggaagagcggcaaaaggaagacgcagacaagtttccctgaggtttccccaacctcttttctctcagccatgctctgaggaactcctttaacgtcaatacatacttgcttatttattcaacaaatgctaacaaggggtgcaatatgaaaaatagattgtgaagatgatcatactctcagctacgtcttcctttaaatgaaagatatcccatctttcgatatcctcaagctccaagtgagtactgaattccatgtggctccaaaccctagagtcctcaatgtgtgacacctgcccccaacccctggaggattacacccacccatccttttcacctgagcctcccttcaagccttcagactgtgaaacaccccccgcccaccatccctcccctctgaggttcccaagtcctgggcctcttcagcccccgcccctcgcagcgcgctcaccggccttgccctgcttcctcccggtgctgggcggcgcagggggcggtgcggggccgccacctccctccagcttgtccggtgggggcggcgccgaggcggccatggagtgggggacccgggttagcggcagcggcgggggatggaggcgcccttgggctgcaccatcgcccagaaggggtgtcaggggcagcccaggcccccgagctgcagcaaccacaaagtgcgacgacagggaagcgccgagccgccgcgcaaactgcgcgctctctccagactcgccgcccgccagcggcggcagcaaccggaaccggaactcgtcgcggccaccaccactgagcgctgcggggagggggagcaaggaccggacgagacgctacgcctgaaaacaggcggcgggcgagggacgaggcttaccacggcaccacgcgagtggaaagggtcgtctccgctagcggcggcccacaccagctcaccgaggggcggcagcgcgcggcccggctgccggaccgtaccatcccgggcggtggagccgccgcggaggggcgcgcgcgagccgaaggcgcacccgggaggcccaggtagcccgggggccggtgctggggcgccgggcaggcccggctcccgcctcgacccacccggagccagccccctctgcggacacgacatccccatggggacggtggcgcgaaacgccccactctgccgcacccaaactctgcagacccccagcttccctgggcggccgcgacctcccgcctccccgtctgccgctgagggcccgcggcgtacacaataggcttcccagaagggttaagaggcagaggtagaagaaatacggactttaatgaagagttttccctttggtataagtgagacccgtggaaacatccaaacagcaaaaggaggccaggatgaaaacggtcaactctcccttatccacaaggccaaaagagggggggccggcttgctgtggtgtggccaccccgggcctaggctgggccgggcctgtagaaggtactcaggaactgcaggttttgcgtttcccctccatgaaactgacaggcattcgggctgacttctgcctctcagtctcgcggtaagagacccaagtttttctagtcctagatggaaataaatttcatctgcctcaggtctctggtataaaaggtgcgatcccagttacctcacaggcctaggcgaggaaaatgccaagagctgtaaaagggcttggaaaagtcaaaaaggtgatgtataaatgtaataattgattatcattttgtgctcaagaataagcaatggaaaagaaaataggaaagtaagtctacagccctaaaatatatgcatataaaactttaaaagaatgcagttccaactctacagatggtatgtggggattgtctactgctttatagtctcaatgccccttttctcacctccacaaaatccacctgggagagttaactgtacaagaggcccaaattcagtcacccccaccccgccctcccagaaagggaggcagggcagaggcttcaggaggaagggctgcactttggcgtagagtacataggcatgcaacatgggagggcaggccttatgaaatgtatatacagaccccttggggtgaggggccccggccaggaggcactgagcaagggaggggtccatctcccgcctggccgggagtggggctctggggcaatctctaagggttgcatatccccagggagaggggacagctgccactcctgcctctgttatcccaacccaaaccggagagggtgctcagcaagaacacaggtcccagaagccaagaaggtgttggcatccctgtcattgaattcaggggtccaagaactgtttgcataaaatatcattagacctaagagatggtcaaaggcacaaagtttaaacatggggggggcgggtgttgagaggggtctgggataccctgaagcccagaggtgtgatttgttcccccttgcccagaagggtgactgttccactgggcctgtcaccacaggacattttccatgacaagcactcaccttcttggggaaggggcatcaggttggcacaggaaaggcccaggtgaggggccactctgtacattaatactttggtgattaatgtttggggagaggcaggattctcacccaggcttttgactcaaaccctctcactcagctggatatgaaacccagagtccatgctactcccagctctgacacaaggccaagcccacagaacactcccaaacgaggtcccgagagttagggaatagggtggaaaggattggagggcatcttctggaagagagcgctagggcagatcacagtttccgctccacaggttgctgtagacacagttcgctgcccgcagagatgatgggcaagtgcattgtccatgtggtagctgataaggtgactgacactttcaaagcggtgatccttagtccgaacctgggagggtgggaaggaagaaggtcaattcaggtgaagagtcaaataagacctcagcctccaaggtggaagagggtgaaacagacaagaggcttgaaggaggagaaaaaaatggtgggggagagtgtggcctgtcaatcctgatcattgaggcttctctagaaagagacagttgtaggaatagacaggtcagtgaagtgagaaaaggcaaaggcgacatcagccctgaaagagtgaagctgagagctatatacccctttcttgacctggaggaagttggcatgtctcagaagagtatacacagtgcaaaaaaagatgtggaggctgggcatggtggtccgtgcctgtaatcccagcactctgg

SEQ ID NO: 12852 - DNA, 12493 bp, Homo sapiens
cggcccacaccagctcaccgaggggcggcagcgcgcggcccggctgccggaccgtaccatcccgggcggtggagccgccgaggaggggcgcgcgcgaccgaaggcgcacccgggaggcccaggtagcccgggggccggtgctggggcgccggcaggccgttcccgcctcgacccacccggagccagccccctctgcggacacgacatcccatggggacggtggcgcgaaacgccccactctgccgcacccaaactctgcagacccccagcttccctgggcggccgcgacctcccgcctccccgtctgccgctgagggcccgcggcgtacacaataggcttcccagaagggttaagaggcagaggtagaagaaatacggactttaatgaagagttttccctttggtataagtgagacccgtggaaacatccaaacagcaaaaggaggccaggatgaaaacggtcaactctcccttatccacaaggccaaaagagggggggccggcttgctgtggtgtgccaccccgggcctaggctggccgggcctgtagaaggtactcaggaactgcaggttttgcgtttcccctccatgaaactgacaggcattcgggctgacttctgcctctcagtctcgcggtaagagacccaagtttttctagtcctagatggaaataaatttcatctgcctcaggtctctggtataaaaggtgcgatcccagttacctcacaggcctaggcgaggaaaatgccaagagctgtaaaagggcttggaaaagtcaaaaaggtgatgtataaatgtaataattgattatcattttgtgctcaagaataagcaatggaaaagaaaataggaaagtaagtctacagccctaaaatatatgcatataaaactttaaaagaatgcagttccaactctacagatggtatgtggggattgtctactgctttatagtctcaatgccccttttctcacctccacaaaatccacctgggagagttaactgtacaagaggcccaaattcagtcacccccaccccgccctcccagaaagggaggcagggcagaggcttcaggaggaagggctgcactttggcgtagagtacataggcatgcaacatgggagggcaggccttatgaaatgtatatacagaccccttggggtgaggggccccggccaggaggcactgagcaagggaggggtccatctcccgcctggccgggagtggggctctggggcaatctctaagggttgcatatccccagggagaggggacagctgccactcctgcctctgttatcccaacccaaaccggagagggtgctcagcaagaacacaggtcccagaagccaagaaggtgttggcatccctgtcattgaattcaggggtccaagaactgtttgcataaaatatcattagacctaagagatggtcaaaggcacaaagtttaaacatggggggggcgggtgttgagaggggtctgggataccctgaagcccagaggtgtgatttgttcccccttgcccagaagggtgactgttccactgggcctgtcaccacaggacattttccatgacaagcactcaccttcttggggaaggggcatcaggttggcacaggaaaggcccaggtgaggggccactctgtacattaatactttggtgattaatgtttggggagaggcaggattctcacccaggcttttgactcaaaccctctcactcagctggatatgaaacccagagtccatgctactcccagctctgacacaaggccaagcccacagaacactcccaaacgaggtcccgagagttagggaatagggtggaaaggattggagggcatcttctggaagagagcgctagggcagatcacagtttccgctccacaggttgctgtagacacagttcgctgcccgcagagatgatgggcaagtgattgtccatgtggtagctgataaggtgactgacactttcaaagcggtgatccttagtccgaacctgggagggtgggaaggaagaaggtcaattcaggtgaagagtcaaataagacctcagcctccaaggtggaagagggtgaaacagacaagaggcttgaaggaggagaaaaaaatggtgggggagagtgtggcctgtcaatcctgatcattgaggcttctctagaaagagacagttgtaggaatagacaggtcagtgaagtgagaaaaggcaaaggcgacatcagccctgaaagagtgaagctgagagctatatacccctttcttgacctggaggaagttggcatgtctcagaagagtatacacagtgcaaaaaaagatgtggaggctgggcatggtggtccgtgcctgtaatcccagcactctgggaggccgagggaggcggatcacttgagcccgggagttcaagaacagcttgggcaacatggcgaaaccccatctctaccaaaaaaaaaatacaaaaattagccaggtgtgccaccacaccgcagcctgagtgacaaagcaaaaccctatctcaaaaaaaaagaaaggaagctgagattactgtagaaaacaaacaaaagtttttttgtttccagacagggtctctgtcacccaggctagagtacagtggcgcaatcatggctcactgtaacctcgaactcctgggctcaagcgatcctcaggcctcagcctcctgggtaggtaggactacaggcatgtgtcaccattcctgactagagacaaggtctcgctatgttgcccaggctggtcttgaactcctggcctcaagcaatcctcccacctcagcttcgcaaaatgttgggattacaggcatgaaccaccacacctggctaaacaaggaaagttttgaagaacagtgaggcagtgcagataagagaaagcacagtggtctgagtcctgagtctggggagctggagaagcccttggatcttcttacaaaaggaaacttgcagtgtctagcctctaaccatctgacattgggcatcacaacctcttcagggtggtttccttatttgtcaaaagaggggcacagatgagatgactgccttctagctctgataagcttaaggcttggggatttgaggacgggccaggactgtatttgttttgttttgttttttcagacagagtctcactctgtcacccaggctggagtgcagtggtgtgatctcagctcattgcaacctctgcatcccagattcaagcaattctcctgcctcagcctcctgagtagctgggactacaggtgcctgccaccacacccggctaatttttgtatttttagtagagacagggtttcaccatattggtcaggctggtctcgaactcctgacctcaggtgattcacctgcctcagcctcccaaagcgctgggattacaggtgtgagccaccacgcctggccctgtgccaggactataaagaacatagttcaggctaagggatgagcctctggaggaagatgccagacactttaaagagcaagagaggcccatagacagctgcccagcgggaatgtctacaaagcaatgagggaaggaagagggatacactgtagggtactgtaccttcctttttgccacccctcacccacacctctgccacactcaccacaccctcagggtccaccagtagcaaatgcttaggctgcccactctgcaagccagtgagcacatactggccaggtgtggtcgtgctctcccgtaccaggaagtccccattgagctgcagcagtgcctcagcctcccgccggctcagcttcccatggaaccagggctcccctcggagctgctcagccatggacaccgactggggaggtggaggcacgcgaagagcatcttcgaagggctctggaagtatagagggagggtgaggggaagtagcaggcacaacacacacccaagacccagacttcagggaagggaagtcaggaaggaaagagcagataggcaggagaagggccagaaccaagtagaaaggtggggatgcagagaggagagagacgagcactcactcatgtcaaacaggtcccggggtgcactgccattgatagcaggattggggggcccagcaccacccactgcttgccgggccttgtctaggttctggacgttgacataggagggatcatcaaaaagctctctgcctgctgaggaaagggaggctctacagtgatcccagccctgcctccaacactccccagctctgcctatctcggctcccttcatacctggacagggtggtggaggtggcatctgtttgcggacttctggatctcccccaacaggctgtcctacaggctgcagggataaaaataaggtgagaccagaagccctaaccaaccactcccaccctagccccagcccgcctccatccaagcaacttaccaatgtagctcccaagtggctgggggtctgggcattgggtgcagtgggtcgagcagcccctggagcggctccttcccgaagcctcatgtctaccaccccccccaaggtgttccttccccgggaagtcattatagtactgatggtcaggtggctcttcctcctcctcatcccatgctgagccatcaaagccagccatcctgagggacaggacagtgaagctgtggctgtaaatgtgtggtgggcaggaggagggaaggacagaatagaacagcagccatctattgggtatttactatggattaagcctgaggctgagtgttttatatacataatcatttcattctcctggcaaccccgtaaggtaggtattgtttccttccccacttttacagatgaggaaaatgagggtcagaggtgaaaagatctgcccaaggtctcacaactaaaaggcggccgagctcagatttaaattcaggtttgactttaaagctcatccccttggccaggtgcaatggctcacgcctataatcccaacactttcagaggccaaggagggagggttgtttgagcctaggagttcaagaccagccaggacaacatagcgagaccttatctctaccagaataaaaatactactactcagccaggtgtggtggcatgcacctgtagccccagctactcaggaggctaaggtgggaggatcactcaagcccaggatatggaggctacagtgagctgtgattgtaccactgaactccagcctgggctacagagcaagactgtctcaaataagtaatgctcttgctcttgatctctgtgctatctcccaacaaggaagggaagcaccatgtaggggggtggggggccgggggaggcactccagctccagaatattttaacctctcctaaatattcaatccctactggctccactgcttatccctcaaggcctgaggtgggaaaggttgtaatctcagggaaaagagatatcctcccaaacccaaattcttgatggcttctagaggcaggaaaacacataatgccaagcagagaaatgagcaagaaagagggatgggagtagaaaatcccacctagccagagagagatgtaacttggaggccccggactacaactccaccatgagcaaacaagaaaagctggtcctgcggcaagcagggcctcaaaagtctttcctcctgggccacaggaaacagaagaatagcaggaagtgggaagcagaggcacacaggttattccctccctgaacctctcaactcaagtgtaggaagagcagccctcctttcctaatcctaatccaagagctgctccacactctccccacctgctcacctgtcatgaggggtgaccagtttgggtgggttcctgaggtattgtttgaagcgcaactcgaaggcctggccaatggtgctgatgacatcctgggcaagcccttcgggacactccagaatgtggcaggctgagggcacagcagaggctgtcagtgagctgagcccactgggaggaggcacagacaggggccctcatcttcctctgcaggaacccccactgagatctacttagagtgggtacagatgaccaaaggtcctactcacctcctcaaacagccagacccacccagtgctccccaccatgcctcacctctctgattcacagggtctttggcaacataggcgacatactcggctgtgtcctggggaggaaggtcaaaaaattttacagttctactttactcctgacccctaaaacccagtccttttcagatatccccacaatcctagcacccccacttctctaatcaatgtcttcccaatccctagccccttgctcttctcccaccgcctttgctctgttccccaactcaccggatccccgccggatgcaaatgagatagattgcatgtggtggttggcgatgatctgagaattagggcaggggatgaagaaggaagggaatgccatgtgtcaggcagcctcagggcccagaaccctggtgccccagtctcattctctgggttccttatcccatatcctcatttcctccttccctactggtctcctgctctcaagccctcttcctagattttggcctcctaactagatctccccttagcacccccatcagtgtttctggtccgtctgcccaccttcaccaacctgtttgcagtctgcggccatgaggttgaggctgctggtggagacggtgagagtgattggcattccagcaaatttcaggttactcctccccaggatagagctgagcgggcggctacagggctaaggtagggcccagggtctcagaaggtgagggttcccagcacaggcaaaccacacttttgcctcctggccctctccccacatgccccacacttgcctccccactgcccctccacatttcccagcagcatccctatccccaaggaccccaagtacctttctcctccttgtcgcccccttagcacccggcacagcctcacacaccagactgatggcctccctggggaaagaggggtactcagacccagcgcctgcctgcctgcctcccactcaactggggctgccacagggctgggggaggggaaagccaggccagactcccagggcactccaggctctttgtcatggtggattgaattaagggcctttaatatttgatgacactgagaggccacttcctggctgattgggttagggcctcaatgggtatagccccacccccttccagctaccaaatgtcccattcccttcccaaaggcagcagcaaccttccatctaccccccttttctactccagctccacctgccagctgcttctgccaccttccccacaactcccaaggctggataggtaaggaggatccgggccaaaggggcctcctttcagtaagaggcggaatcactacctcagctttctctcaatcccctttactacgcaaagatcagcccccagcagcagcacccaagtgacccactcccctcctctgtttcccatggcctcactaatcccaggactcccacaatccactccctccccactaacctggtgacctgagtccgggtgttgaagtccagggcacgcattgactggaggacctccacacaacccatgtactaaggggagggagaagaggacagcaggtcagcggctcccccaccccagccccttcacaaagggccctaggactttacccatatggtccctaagggaagtaaagaggaagaagttctgcccacttcccgtggctacatcccacaaccaaggtgaaagacaacagggaatgaggagaaaaagaaaaggcaggctagaaggacctcacacactggggagagagtttggaggggaccgacaggcattggctgggatggagtgacaactccagaaagcgggaggagaatggaggaaagatcaagaagtcattcattccaacacttattaagagcttctgccatgctgggcattgtgctaagcatgccagggtgggggtgggggagtgaaaagaaggaagggggcccaggcaaagctggaagggaaggggctacagaatcggggaagggatgagaaaggtttaggaaataggacactgaaacggggttgttggggaacagcaggaaaaaagagattccggccaagctggagtgagcattagaactggagggggtctgcgggggaatggagaggaggatgttcactcacccgaaccaagtaggaaaccccgggtcccatgactttgtcgttgggatgcagccagccccgcgtgggcttattgacaaagctcccgtggcgggtccactcctcgcccccaagctggcccccttccacccgagtcctgcgcccgccgcctccactcagcttgttcatgtcctggaggaggggtagggggcctgagtctggcatggctgcccctacgatcccctccccatcatcagctgcccttcctggctcccccttagaccctgggcgccccccagccgggttggccagcctcaggttgctcatccgggggaagaaggagcacagggtagtgggactatcgtccccaggcagaggaggcaggatgggccccagggatgaagctgatggggaaggcagctcctccgggggggtggacccagaagccccttcctccagcgatgacagagactcattccggagtggattgtacttgggcttggggggcaggagatccatagttgaggtgaaagaggggctgctgcccagcctggcccccctgccagtttgggcaagggggccaggcagggggtatccccaggcccttagcctggttggacctctgtggcccaggagtcacagaagtcctggggagggagagggacaagtggcttccgctccccagctcagacccagacagtttcaggccccatccccgcccaacgtggagcctcttctctggctgagaagagaacaggctggacccagcgcttctggctcctccccaggggcggggagctaaggggagagaccaatcgtgaggacagtgctgactcacaggctcagaggggctgagcccccaccccgccccaacctcgaactggagcagggggtagggctatccaagcccctctcccctgccctatacaaacaactagtaatctggggagaagtaaagtgggggtgggagggaaggatggaagagtgggacggaaaggaaggagataggaggtctgggtcactcaaaaccggacacacgcaggccaaagggggcaggaagccaggcaggagtacaggggaatgagggaggaaacagaggcagctgggggtggaaaagggaggagatctcagagctcagcatttcccttcctgtcctggttggacactcgaattcccccaccctctctatgcccgaaagctggctggccccagcccaggccacccccaaccgctaccccatacagtaagcctgggccattagcatcctctgctacagcagctgtggactggagctagcgaagtggggatgggaagtaagtggtcccaatggatgcagagcagggccaagaggaagagcaaagctggtgaaaaaaggggaataaagttcaacctggatgatacatcaggaagctaccaggcaagaagggaacaagaggacatgctggtcacggcttgttctctacgtatgccatctaccacaccaagaccgatggctcatagccaagcactgtcctgtctcccctttccacagggcttgttaacacagcacactgtcaagggtgagaatgaggcaatcaggtccccactcccactccaaaccaccccaattcacatccctcctcttacagggccctaagccccaccaaagagcacagcatccttcacaccagggaaggagcctggctggaggaggtggaagaaacagttctccaagagaagtagaaactacaggccaggaagggacagagagatcagaagacacatctgcgtcaataaggacaggagaaaaataagtacaggagaaaggggtgtcaggagaagatgggttgaagctggacacagggaacagtcccaaacccattcctgccacccacggcttcctgccactgctcttccggagaatgccacaggcaaagctggaaagtgaccaaaaaaaaaaaaacaaagatacgtattcctaccgggcgcggtggctcacacctgtgataccagcactttgggaggctgaggcgggtggatcacctgaagtcaggagttcgagaccagcctggtcaacatggtgaaaccctgtctctactaaaaatacaaaaattagctgggcgtggtggcgggcacctgtaatcccagctcaggaggctgaggcaggagaatcgctcgaacccaggaggcggaggttgcagtgagccgagatcgagccattgcactccagcctaggtgacaagagcaaaactccgtctcaaaaaaaaaaaaatacgtattccccccagctcaccttggaattacccttagatttacttcagagaattaaaatatagatagataattatcctgattaacaacattaacacttgaagtgtgttagatgctgtgcttaactcttacatctccccttagtgctcattccagaagagctttgtcactctgccagccaatcctgagaaggaattttatcacttcatttccagccagctctcgggcatagagagaatgaggaaaggattccaccatagcctcacacccccaaaacacacaaacacacactaggatgtccctcatctgtagagatgatgttctgtgggagcctacagtatccagagccagggaaggaccaacgggtgtgggcgttcggaagaaaagaaagacgtatgactcttgaaatttacatagggagaaaggagattgcctactggaagtccaggtgattgggtgtaggggaaaagctgtgtgtggcttcgcagcccaactgggaggaggggacaggggcgggaagtggcaggaaatggcgaaagcctcaggaatgtttccagcagggaaggctgggcaaacggggccaggaggaatgcccagacaagaactctggttagggggaggggaagagacagagaagtagcgactgaactgtcccttaaaaaaaaaaaaatcaaacaacaaaaagagcactattatctacccccactccaaactaccgttcttctggtagtagaaaacttttgctcatgtcacacccacatgccacacaccaacaaatccatggtcttatccacttatgtctaggaaggcctagagctacttctgggatgaggttggtcctgggaagggaaagccaggaagtgaggctgggagtctgagggcaagtctctctctccctctcgtgccaaaccccacgttcagccctttcaaatagttctacccttggaggaggttaagaaagaggaaaacggggacgggcgcagtggctaacgcctgtaatcctaacacttaaggaggctgataagggtggagcacctgaggtcaggagttcgaggctagcctagccaacatggggaaaccccgtctctactaaaaatacaaaaattagccgggcgtggtggtgggcgcctgtaatcccagctactcaggaggctgaggcaggagaatcacttgaactcaggaggcggaggttgcagtgagccgagatcgcaccattgcactccagcctggacgataagagcgaaactccgtcttaaaaaaaaaaaaaaaaaaaaaaaagatagaaaggaaaacggaaaacggctgcctttaatctcactccttacagccagagatgggaactttgacttcccacctgggggagcacgagagtgctcggaaaactgatcccaaggcccaaaaagagaaaggacaggaaaatataagcaggtggagtttcagggattgacgacaaggcttttcagctgatgacccaggtcccacaaagataaagctcctaagggggcgtggtcccctaaggacgcgaacttcagacttctgggcggggaggctttctggacagtcagacgtggattacggagggggcgtggcttcggaggggcggagcttcaacaaattcgaatcgttctttgaagagcagggttttgcccttttgggagataggccttttgacaggagttagccgaggatcgttgctaggaggcggagtttcggagaatggaaggagtaacgaagggtttctcgtagtagggcttggaacgtgtcggggggtggggacttccagaaaaactgggcgacagggtggggtcggagacaaaaaataaaaatcaagtcggggttcgggggagccccctgaagttgggaggtgggacttccggggagaggggtctcaggggcgggacttataaatgaagaccggaagtggggtcccgggagaggggttccggggtgaaagagtgagtcacctaaggagaaaaaagtcaagactcaccagggcctcatggagtctccgcaccgcaccgcgggccgatttggtgccggatcacgccactgccagcttaggttaccgctccaactttctccccgggccctgcctccctggagaaactttattacactcacttccggcctcactaacccctgaccctctacctcagggtccctccttcacgct

SEQ ID NO: 12853 - DNA, 3985 bp, Homo sapiens
ttgtctgggattttaaaatcattttattaatccaacagtacaaaagacccccaccaccaccgcattctgccatcactttgttccaaaaagtagtggagtgagagagcgagagggagcagatccagcaaaaacactcccccaggggccattttacaaaatgcggagcaggggaagacaacacaaaaacagcaacagataaatggggcaaacagaacaacaaacacaagagttgagcagcggggtgggggtggggggttgccatctacgccgttttagtgtgagggacactgggaacgatgcccagaggctgctctcctcccagcctcaaaggttgtcagctccaccagagcagggtcttctctcctcatgccaggaactgagagaagtgggggtaggggaccactaggtctttgccactgtatcttgagctgggggactcctaacttctccgagggccacaccccatgcctgccttccccaccccatggaggaatgtgtgcatgaacagaaaaggagaacgagcagcgctaaggtcctcatcaggccccaggcccatctctggcaggcagtgcttaaaaaataaaaaaagacaaataaagcccagtgcaggcctttggctgagaggaatgagaattgctaattaatcaccaggcccaagaggatatgaaagaatagcaaagagaagcaacaaactccaggctcttctacctttgagtaccatggcaatgaggatcccgccgcatcccctacccacaggctgtgacagggcctcacttggatccttttatcatggaggaaatgaggtatagggctctgcgccttttcaagctttccttcaatcaagccaggaaggcaggggaataagggcgccgaaagttgaagaacacacggagtataatgtgcaacagatgggctgggggaggagggtaccaccaaagtccagactttcaggacagcccaaacttcaaatattctggtctgtcagataacatatcccaatttttggcaaaaatatggtcattaggagaaaagcacgagagaggctgagaaaggaccagtgactttggtatgaagaagatacgtcctgacagcatctctcacctactgtcttgaagccccaaatcaccaagaaactgccataaccaggaactctcctgcttcctcaggctatttggttctctgagggggaaggagttgggtaagtcttggaggaagcaaaggagtgggtagaaaaaggggaaaatccccatttattccctaaagctgtctcccagagcccataaaagggctattgcagggatggcaagaccccaattcctctggccagaaacctttaacacttgactccaaaaactaaggctggagctgtggggttcagtaggggtgttaggcacaggtgttaggggcatccatcatcagcagagggaacacccctgccctccggatcttcctccagccccttttctcttgcagccacactcctgggcctccagaaatagccacaaaatggctctgctcagcagggctttggtttcctggatctctgtagatctcaacatgtaagtttcccaaaacagtgagcaatccaggctcttctgcctgcccacctcaattccttttctgctcccaggagccactgtttctgccccatggggatggaaagccagtggaaacaaggaccaagagccaaacatcaaaaaaatcaccctggaagagcagggagagacatgtgcacttccctgggccacttcaccagcgtcacccatcgttagcagccaccagctgccccatgccctcacggatgtagacagactggatctccttggtcttgaggcagagatcgcaggcccagacggcagaagcttcagtggtcagcagcccataggcgctctcagtcatgcctgtgcactcacggtggaaccatttctggcaggaggcctcacacagaatggcatcctggtcatcgttcacctcactccgacaggcaccacatgggtacaccaagcctgggggaggctgggcccggagcccccacctgccttgccagggggtgccaagctgttggcatctggagtgcccccaccccgcccactgctgttcggggggaaactgggctggttcccattaacagcagcagccggggagcctgagtggggctcctggggaaaagcagtagaagcaggtggattcaagggcttccccccatcctcaccaccagggccaggaaagccagggtccggaccaggaaagggacttgtgttaggcggcaggctggggagcccctgaccaggtctctggagaggagaagggccaaaaggagcccctggctgagcaaatcgttgggacagagaaggtgggcccagctctgctctgggaggctgtcccatggtgggtgagatcatgggaccaaatccccccactgggcccggcatcatctgcccactgggaggactaaagttttgacccagaggctggttgaagggttggctgggaaagttcatgttgcctgggggtgggtagccaggaccctgggggggcatgttgaaagcagggcccataggattgggagggaaggggggtggctgtcgacggagtggctgggggccccctccacctccagtgctgtagcctgggggtacctggcccgccatgcccccctgcacacggaagcctccgaagggcacaggactgccaaggaatggaggggctgcaacccccactttgggggctccgaagtcatcttcaaaagggttggatgcaaccaggtgatccaccatgggagttgggggtggtgcaaactccgtcagatgtgagtatgcagggccctagtgagaaacagttgagggaaagagggtcatggagggaaacacagagctaaaccaagagagcactaccaacacaatacacattttggaggctgatactgtgggcagctcaggtctaaaatcaatatggaccacaggccaggtgcggtggctcacgcctgtaatcccagcactttgggaggccaaggcgggcagatcacgaggtcaggagatcgagatcatcctggctaacacggtgaaaccccgtctctactaaaaatacaaaaaaattagccgggcgtggtggtgggcgcctgtagtcccagctactcgggaggctgaagcaggagaatggcgtgaacccaggaggcggagcttgcagtgagccaagaccataccactgcactccagcctgggcaacagagcaagactccgtctcaaaaaaaaaaaaaaaaaaatggaccacaggccaggcacagtgggtcacacctgtaatgctaacattttgggaagccgaggcaggaggatcccttgagcccatgagtttgagtagtaacacagcaagtctctgttactacaaaaaaaaaaaaagaaaagaaaagaaaagaaaaaagaaaaaaaaaaagacaagaaaaagagggtggagagtggaaccaacatagtgcagtaactatgttttaaaaacaggcagaactaggatggaatcccagctctgaccctgaaaaacaacctcaagactgtggagcatgtatttaacatttttaacccccagatttctcatctgtaaaatagggataatgcctatctccccaaactgttaaagcatgttagcgcaatccctggcactaaaaaaaggatcagtaagtggtaggtgttacgttatcatcaggaggaaaccaggacaggaaacatggaggagactggaaccctgcgtggtaagaactttggtcgaatcatctcttaggagaggatactttcccctaaacttgttataaggttcagcgaaagaacaagaagcaaagcaagaaagacagttttctctctcctccctgcagctgatacaagatacaaacagatactggaatggcagagtagacagtgtgccgccaaggggctgctgggaaccaaacccaccaccaaccaccattcacctgagtatttgacttccttcgcttcttttc

SEQ ID NO: 12854 - DNA, 5219 bp, Homo sapiens
tttgaaagcgaggccaaagtgggtgggagcgcgtgctgttgggagttgcttggaggttggcggcgcggggctgaaggctagcaaaccgagcgatcatgtcgcacaaacaaatttactattcggacaaatacgacgacgaggagtttgagtatcggttagtgctggcgcgggacaatagcgagggtcgtgagctttggccgctgagggcacaaggaattagtaacaggaactgaggcgatagaattggcgcatcgtacgaggtgcgaacgggcaatggtgtgatattgtggaaggcgtaaggcgcatgcgcggaggtgggaggcgctcgtaaaacaaagtggttgcgaatttggagtcgcctctcagtagagaggagagaggggtgggcgtggttagggtactgaccaccctcacccatgaggctttctggatcattctctgaactttatcgggcaaacttaacttgccttgtagagactgtttcacagtaatcttgtcgaatccagtgggagaacgtagcaaaagcggagctggaagtttcctggcgtccctaacaggagagtagcgctgagagagttgaatattgcttattaactcgtgaaaaagacaaggggcgtggttgtctggcttgtgtaaggaaggggatcgcttgggactgcaatggaataaaactggctaggagcattgagaaaatacttaatatgggtctaatagatgccctttaaatatcaaagggaacagttacggaatacttaacaggtttcaggtgttctgctaaagtgcaaggataacacatggtctctgctgttcacaaatttaaaaatctgtgggtggtaccgacagacaccagaaaggtgacacacgctatgcaaggagccattacagggtgtgatgggagcacacaagacttgctaaggagagggaactggcgacccgaaggctgcggcttcctagctgtgagcgggggttgaggtggggctagaaagtcagtcccctacttttgctaactccaggacgctcccccatcccacgcttcgagaacgccccccgccccgccaccgccttggaggctgacctcttactttcggtcggtcttcttccctgggcttggtttgggggcgggggagtgtcctaagggccaattcagcgtgatgtctctttcaccaccattgaaaacgaaaccagtagtaaactacgcgtgttttcatttatatgtcggagataaaaacacagggacagaaagaggggaacaacagacattggggcctgcttgagggaggagggtgggaggaggtagaggttcaggaaaaaaaaaaactgtcgggtactatgcttagtacctgggtgatgaaataacctgtacaccgaacccccgagtcaggattttacctatataacaaacctgcacatgtacccttgaacatgaaacttaaaatactgagaggaaaaacggaagagggaatgttggggaaagcttcctagagggcagagcctgagatgagactctaagaaaaaggtatgtgggaggaagcacctcttgactgaaattgtttagaagacactggatagccatctgccaaggatggtgatgatggaatcctggcactggatgtggcattcgggcttgataaattttaagtgcataatctagattgggaataagggaagacacaggattccacaaatgttggcattatgctaatctgtattaattgtaataattaagaccacttcctggtttgtatcttgtctcctcagttggagaacataaaatgaaaacttgcttttcttgtgtctcttcacccagcctagttcagggctttgggtcttccagagaactcgatgtgcattgacaaatacataatcatctttatgccaagacggctccagaccctcctttaattaactttcttttcctcagctgttttcctctacatctgaactaaactaacttaaaactgtatgtgcttataagagatttgtggagctgggaaggaatcaccatttcatcccctggaagatgaaactcttggcagtggcactttggtttaagaggggttttttggtgtatgtattgaagccaaatttcgtgccagggtggtgttagaatgtgagctattttcattatatttggactagaattttttcttttaggagaatggtggggaatcactgttactagcacagagggagaacttagtacattttcattgagcatgacgaagactatgtggattagtttgattcacatcagggtaataatttttttgctatgaagggagacttatccttggttagaaaagcacggaatttacccagaaagtctcaaggtacatccctccagagttaggaaaataagattcaggatagatttaattttttttttaagagacaaggtcttgctttgttgcccagactggagtgcagtggctattcacaggcacaaccattgtgcattgcagccctttcttttttcttattttttttctctttttttgagacggaatctcactctatcgcccagatctcagctcactgcaacctccgcctcctggattcaagggattctctcctgcctcaacctcccaaatagctgggattacaggtgcatgccaccacacccggctaatttttgtatttttagtagagacggggtttcacgttgttggtcaggctggtctccaactcctgacctcaagtgatccacccacctcagcctcccaaagtgctgggattacaggcatgagccaccgcccctggcctatttcttctgtattttaatcagatttcaaacttcatactgtatctttttcaaactcctgggttcaaatgaccctcctgcctcagcctcccaagtagctgggactgtaggtttgtgccaccatgcctggcttagattttaaaggacaagatagttcatttcatcctttgtaataacttgtccacacagtacttcataaaaggcctttcctcgccacaaaataacttctcttccttccttctaattattaacactgtgtgctccgtggggctcccattatgttgtagataatcaactagaagactataaggtccatgaaggcggagaaaatgtgccttgaacttaagtgctcattcactggaattattcactaatttgtatttttaatatactctcggaatttatataacatagcctgtatttctagctgctgctaccccacaataaaattatataaactctgacatcaaaaaccagtttttctttcctttcttggccttgtaaacaggcatttgtctaagagactgtatctggtactaacataaattccccacttccccgtttctgttacagacatgtcatgctgcccaaggacatagccaagctggtccctaaaacccatctgatgtctgaatctgaatggaggaatcttggcgttcagcagagtcagggatgggtccattatatgatccatgaaccaggtcagtgcactggctaaaaacaaccatatagaactgctacactgagagaatgaaagaataagattgtataacccaaatagggagataggaaatggtttactggttccttccccctccagtcgtgggggatttttttaaaaaaaaactagtgaccaaaaataagactaaaatatctgggaagttcagagacaacctgtcactgaaaaacctcctgtaatctttcattcaatcagagggtattctttttaaggccacatatagcctgatcatagcccctgcctcattctccatcgaaaacattcttggatgtgttctaaataagcaaaggaaagtatatttattgataagacaccagacacccagctgccaggcaaaactaataagggacaccctggggctgtataaacatagcaaaagaactgatattaacaattctgtacttggcagacagtccagacttctgggtctgcttctaaggccatatgcttaagtctttatttagttataaagatctgagtgggtgatagctggggaggtggtagtggaatacactataggttgtacatagaatggtgtgagcttgtctcttagatttccctcactctttcagaacctcacatcttgctgttccggcgcccactacccaagaaaccaaagaaatgaagctggcaagctacttttcagcctcaagctttacacagctgtccttacttcctaacatctttctgataacattattatgttgccttcttgtttctcactttgatatttaaaagatgttcaatacactgtttgaatgtgctggtaactgctttgcttcttgagtagagccaccaccaccatagcccagccagatgagtgctctgtggacccacagcctaagctgagtgtgaccccagaagccacgatgtgctctgtatccagaacacacttggcagatggaggaagcatctgagtttgagaccatggctgttacagggatcatgtaaacttgctgtttttgttttttcctgccgggtgttgtatgtgtggtgacttgcggatttatgtttcagtgtactggaaactttccattttattcaagaaatctgttcatgttaaaagccttgattaaagaggaagtttttataatctagtgctgtaattgtacgggttttttccccctcactcagggtgagcatcatcaatatcatggttctaattatatgcccttcagtttgataatgaagctcagctctttgctgataatgaggtttaacattgagataactggtttttaatctactttaagcagacttgctgtcaaacatctactgaaatatatttcactctaactactagcctgaggtagaggttatatagggacaacttcatctcatccaaacaaatgaactgcttcctacagtcggggtgctgcctttaacatagtcccaatatttgaatggcacacatggataaaaggatgctgtcagtcaggggctgcttgtgtgtcccaattcctaataggaataataggcatatctatgacctattcactgtgccccttggttggggaaggttttcagctgttcttaacttggcttgggcgttggaatcacctggggagctttacaagtactgatgcctgcctgagtcattcttaaggattcttaattggtctggagtgtggactgggggtaaagatttcaggcatcttatgcaggtaggtaaagaactaagctttgagaaaacaggtgcaaaatgtagctgtttaagaa

SEQ ID NO: 12855 - DNA, 12174 bp, Homo sapiens
atttaatcacaccctgacctgctttgaacataaccttcaggtattttatatataatatttaaaattaaaatgctgccttgtacaaaggaataatgtgcagttccaagtttttagagcactaattattgatatttatctaaattcatgatgtaaaggagttagtggacctggatttctgctcttaagtaagttcttctacttacaaatcatgaaaacctcagttctctcattgtaaaatggagataatatctatcctgcctatcttaaagtattttgtaatgagaatctggtgagataatgattgtgaaaacattgattgaggtgtgtgattgtttaattaaaacacaatggttttcaatctgacttacgtaggtattttgcagtgtagtatgattctgtctataggaagtttattctttgcctgaaatttgcttaagtatgttttacctaccttaaaaagcactgtttagtaagataactttgagtattgaattatgataataaaaggtagctttaagaatcttaaccttgtagattattgccatctctatctctgactcttgaattttggtattggaacttgcccggtcgtggtgaaggacgaggttggaactctggttaaaatgtagttttgaaacttacataacaagtaagtaatccccatagtagatgtacacatgcttagggtataagcatgtatgatttcttctgtaataaatgtggtaacactgaattatgaatttccttgagaataataaaaattgggccaggtgcagtatctcatgcctataatcccagcaccttgggaggccaaggcaggcaggtcacttgaggtcaggagttcgagatcaacctggccaatatggtgaaaccctgtctctactaaaaatacaaaacttagccaggcttggtggtgcacgcctgtagtgaagtagaggttgcagtgagttgagatcgtgccattgcactccagcctgggcgttgcagagagactctgtctcaaaaaaataaaataaaaaaaattaggtgaacatttctcagaatttgttctgcagcatgttaatagatgtcctatcagaaagggtttagtattccattaaggttgggaaatgctttactacaggacttcagagcctttagtggactgatgtgtgttgtaacactcaaatagcaatttttctataaagtcatcccttttatatatggcttcactttccacagtttcagttacctgtggccaactgcagtccaaaaatattaaatggaaaattctggaaataataagttttaaattgtacaccataaacagtcttcttttcatttaacttagagtacttgtatgagtttggtagatttctagaagtagaattactatattggcagcctaagaaaaagacactagagaaaattatctccaaatatgatgagtttattagggaataagaaagaagtatggtaatttggaatgcactggcaaaccaccagtacatccagtgagggaagggtaaagggaagcttttattagcaaaaagggagaggttcacacaagctgcttggaaactgagttcattggttcctgaggctcaaagccaagttgtcagttcattggtggcgatgccattactgggcaagtgttcttttgagtgcatcttatctgaattactgcagtcctaaagaatggcagtgataaaccatgtgaaagcaggagttgcaatgaagggcgtgaaaggatttcttgtggggtttttagaaagtctttggaaacaaggactctttttgtctctattttgtcttggtctgtcaaaaggtgatttcatcctaatgtctgcaactttcacattattaaaagatatgtgcattttaaatttgaataaaaattgtggccaggtatggtggcacctgcctgtaatcccagcactttggaaggttgaggtgggaggatcatttgagcccaggagttagaaattagcctgggcaaaatagcaagaccgtgtctcaaaaaaaaaaaaaaaaaaaaaggttaaattactccccatctagattatgtgcacaattttagttaaatggattatgtgctcaatttttttttttttttttgagacggagtctcgctctgtcacccgggctagagtgcagtggcgcgatctcggctcactgcaagctccgcctcccgggttcacgccattctcctgcctcagcctcccaagtagctgggactacaggtgcccgccaccacgcccggctaagttttgtatttttagtagagatggggtttcaccgtgttagccaggatggtctcgatctcctgaccttgtgatccgcccacctcggcctcccaaagtgctgggtttacaggtgtgaaccatcgcgcccagccctgtgctcaatttttaactaagtgcacaattgttctgtgaaaaacaagcaatgggctatttcttgtagcagactaaggagagacttagtttttctgtcaagcagatggtgagggtaacattgttgggccaacatcagtgtaattactttgatttttctcttttctctttcatcccaatgttcagttaatattctttcttcatactacaaagtaaagaataaagggcatagaaagcaaaggtgtgaactgactgtttagcaaacttattcttgaaaagacaagtgtcagtctagaagtacaaaatattgagatttagtagcataatattttatgtacctccactatcctcattttaggttatacaattctttggtatttggccctttttgttgactagaaaggcctggattatgagccttgtgataagagagttgagtggggatgcagttttggtgccttttccctttccatttaaaaagttctgtctcagtaagataaactatggtgttcaagtcagcataggcaggaacctattttatttattcagtgagagtaggatagataagtgagggtttgtgatgatgagataatttaggaaattttgtatttagttactagtcatttggcatatgaattattgttatcctcagttaacattagctaatgcagcagttttgaaaatttagaggcacctagaaagttccaaacagtttgccatctgcttcacataccgggtctctaatccttcggacttataatacaggtagaggtcgttttattttatagatgataaaactgagactcagagtgatttagtaacctactcaacatcacagcttagcactttaacacaccatattgtttcccgtcttctagaagcgtaaatagcttacattaaagagatattgtatataatgtttattgtatatattacatgtgcctttgtcattttaggggaatgcacatagtcttttacagacaaaaaattattcagaagtatgcaaaaactgccgtgaagcatacaaaactctgagtagtctgtacagtgaaatgcaaaaaatgaatgaacttgagaataaggctgaacctggaacacatttatgcattgatgtggaagatgcagtaagtactttgcttctgatgtgatacatattttagagtgttattgaatgtaccttcagtatgattattatttttggtgatagggtggaatctgcatattctgtcctcaaccaaaaataactagttataaagtagtaaagttttagaatatcctggtctgttaaaccaaaatggatatttccttagtagtctcatggttaggataaaaataaaacagaaattaattaggtacttcataagtgagttgatgctttggtacattttaatctttttaaatttgaaaatatgtgccatttgcagaggtgtaggtattgttatatgtttatatttcagtttcttgtgcacttgttgctaatttaagaagtttctgagctgggcacggtgactacacctgtaatcccagtactttgggaggctgaggcgggcagatcacgaagtcaggagttcaagaccagcctgaccaacatggtgaaaccccgtctctactaaaaatagaaaaattagccgggtgtagtggcacacgcctgttatcccagctattcaggaggctgaggcaggagaatcgcttgaaaccgggagggagaggttgcagtgagctgagatcgtgccagtgcactccagcctgggcgacagagcgagactccgtctcaaaaaaaaaaaaaaaaaaaaaaagacgtttctggatttcactacatgtttcagaagccattcctcaatcacttcctattccattgttttattttcttatatctattaccatctgaaaatatttatttatttatttttagtctgtcttcctcactaaaatataagccacatgaggacaaggacttaggctttttttgttcactattcagtatttaggacagtatttaggacagtctagcatataatgggcttaataaacatgtattaattgaatggtcaaaaaaaatttttttttctccattttatagcctgcctttacatagggtgccactagatggcaatcatgcctttttaggcactatgatgctggagttttggggcattagaggaaactgagaaattattggctcaaagtagagaacttgaggtcagaattaatgagcttaagaattgagaatgtgtgaattatcacagcagctcagagggaactataagaaccaataatattcgagatggtaaaaagtacttaaaatgaaatgtacagtgtggctttttgtttgtttttactgctccattcctattgcctaaaacagtacctggtttctagtaggctctcaataaataataaatattttgtaaatgaataaaacagggcctaactatattcctcttcatataagttctttgtttgaatgtacaaatggttgacattctagaatactttggtcagtattatggacttagaatatgaaatttctgtatggatataaatttctacaatgactgtattttgaaccaggtttttttcctggcagaagaagttgtcctcaactatcagtaggtttttagaggtatgtattgagtctaaattctagattcctgtttagttattagcaaaataattataagaaattgaagacaagttaaatataaaatagaaagatattgtttgctcttgttccagatgaacatcactcgaaaactatggagtcgaactttcaactgttcagtcccttgcagtgacacagtgcctgtaattgctgtttctgtgttcattctctttctacctgttgtcttctaccttagtagctttcttcactcagagcaaaagaaacgcaaactcattctgcgtaagttttttacaattatttattttatagataaaagcctgtattttaaaaatttaggcctgttttagaaatgatagctactctgagaactcaaagtagattagcctaaaaggactctctgctttaagttttacaatcatgcttactagtgaaagagatctgtgaaaattttataagtgtggacaataaaaagttaaaacagggctaggtgcagtggctcatgcctgtaatcccagcactttgggaggatgaggtgggcggatcacgaggtcaggagatcgagaccatcctggctaacacggtgaaaccccatctctactaaaaatgcaaaaaattagccgggcatgatggcgcatgcctgtagttccagctactcgggaggctgaggcaggagaatcatttgaacttgggaggcggaggttgcagtgaaccgagatcgcaccactgcacgccagcctgggagacagagtgagactgtctcaaaaaaaaaaaaaaaaaaaaaagttaaaacacagtgtctttcagatgattaaattgagaaagctagattacccctggaataaggttggcaacaacagaagaataacaacagaggctttgcactcctaacatggcaatagcagggagatacagacagctcttagacccatcggagtcatggtagaaccacctaagtgtggcaggcaggaagaaactatagctgacataacagacagtttgtttgtgaacaaattggaatcgtagttccaaggagattacttgatataatagtatatgctcaatacatattaattccctttctttctccctatgaaataggccagagcaaaagaagcactaactagagatcccatccagctaaggaagagtggcttctaagtcacgtggctttcttgtttattatcagaatgaaagtacaggcttatgccttaataattttagtttttaaaaaagagaactgtttaggggaaaaggttaattttcttttctctcaaatactatttgtagtctaggaatgtctgatataaaaattcttttccctataaatttcgatcactacttcatctaacttcacttctaatatatctaatttttttaaaaaaaggttacctgtagatcagtttgaactgaatttgtaatgttttgtcaccttaaaatgctagctactagaggggagagtctttgtcatgggtgtatttattaaaggttttttgaaggctgccagcattctgtaaatatgcagtagctcaggtccttaaagcacttacttagaataatagcaaaatattgtgggcacctcaccattgagaaactatttttcagagcttggtatacttttaaagtttagcatcttatttgccttgctaatctatttaactttatggaaagtatttactgcttctgatcaggattttttgtttgctgtcaaagtaaaagtcactaccagtgtcactatttgctatggaagccacaaaccttgtagtcatttcttaattattttctttcttttatttttccattcccacattcccctctcatccccttttaattcattagcaagtatgctgccagttctgcttagtccgtctctctccctccactggtaaaccctagcccaaaccatcttcatctcttatctgtactaacgcaagagccccttaactggtatccctccttccatttcttgatctactaaaatccatacgccacatagtggctagaataattttttaaacacaaattcaccatgtttctctactaacttggaatgcttaatgtgttcccattgtacctagaataaatccaaacttactttccagggtctgctctccaagctgtacatgacctggcccatagccacctttctaaactcgtcacatccattctcctcattgctcatggtgctgtggacagtctggttcctttctgttcttctccactaccaagctcattcacactgccccttttccaaggcccttccctctttacttacctggcttcttgcaagccaggtcttagctctaaagttacttgctcaaagagaccttttatgactccccagtctaagaatacacctctccatttgttcttctgtgccgtctttctttaatggcacttaatcacttaaactaatttaaattaaataattggttatttaaatcatctttttcatttattctctactttatttgtttgtcttccctgcctgaagggaggagctaactgcattagaggtgttgaaattcaccgttagatgatccctgggctagaattttaaaggatgtggggatttatcaggtagggaatataaaggcaaggaagatgtaggtgtatgtactcattcgtatttaacttgtccagtttattaagtcatttgaattttgtcagaagctagatcacttctagtagtttttaacaaagtaattctcaaaaacccaaactattgatttggtttgcctcccaaatctactgaaggcttaagaagtagattttagtttaggccaatgtttttagtttaagttttccctttattttaagctgaagcagtacactcgtccaggaagtcatgttgtgattttccacttacagttgatagaaaccagagacaggccgggcgcggtggctcacgcctgtaatcccagcactttgggaggccgaggcaggtggatcatgaggtcaggagattgagaccatcctggctaacacggtgaaaccccatctctactaaaaatacaaaaaaaaaattagccgggcgtggtggcagacgcctgtagtcccagctactcgggaggctgaggcaggaaaatcgcttgaacccaggaggcagaggttgcagtgagctgagatcgcgccactgcactccagcctgggcgacagagtgagactccgtctcaaaaaaaaaaaagaaaaaaaagaaaccagagacattggtaggccaggcacggtggctcacgcctgtaatcccagcactttgggaggccggggcagacggatcatgaggtcaggagatcaagaccgtcctggctaacacggtgaaatcctgtctctactaaaaataccaaaaaaaaaaaaaaaaaaaaaaaattagctgggcgtggtggtgggcacctgtagtcccagctacttgggaggctgaggcaggagaatggtgtgaacccaggaggcggagcttgcagtgagccaagttcgagccattgcactccagcctgggtgacaaagccgagagtccgtctcaaaaaaaataaataaaataaaataaaaaaagaaaccagaaacactggttctcatccttggctacacatcagaattatctgcagagctttaaaaaagtacaggtactagggtcccattgcagagcttctaaatcataacccctacccaagttttgtgaagctctgaagtagggagactcttagttactcagtataaaatactctcactatgggcatgattgtttttcatttctagaacatgagaaacattcatgtttaactataagtacaaaacatattaccaagccaaatagccatgatttgttttattaaccctaatgactcagtcccattagcatcaaatcagaattgatggtaacgtattttgttagcagccatatgtgtttgtgtgtttatataacataaaactcacttttctttgaggatcattaaaattttttttttacaatacagagttccataataatatacaactcacttttctttgagggtcattaaaatgtttttgttttttttttttcccattacagagttctttcactgatttttttttcatctgaaaatagaagcagttttctttctttctttccaatatgtatagctttccttttctttctcttgccttgttgcgctggtgataaattagtggcatgatgtcaagcaagaccaggtattttcgtcttattccagatcttagggggaaaaatcattcagtctttcacagttaagcataatgattgctatagaatctttgtacatgctctttatcaggttggggaagttttcactgaattcttttaagagaaattcagatttggatttctaacttagacttttagatgtataattttgttattctaccttatagcactttcattgtctaagtacatttatttcacgtacattacatatttaagattgtgatgttcaagaagatataaatgatgttgttttatttgtactgcttctaacaaagtcatgtgcaatttctaacaaagttatgtgtttttaaggttggtagaaaaaagttttaattaggttttaattcttataaggctggaactgttaggattcaaacatagaattaatagataaatactatagattacataaaaatagtaaataatcatgtttgataattaaatttaaattaaaatataattcttttgatttatctagccaaacgtctcaagtccagtaccagttttgcaaatattcaggaaaattcaaactgagacctacaaaatggagaattgacatatcacgtgaatgaatggtggaagacacaacttggtttcagaaagaagataaactgtgatttgacaagtcaagctcttaagaaatacaaggacttcagatccatttttaaataagaattttcgatttttctttccttttccacttctttctaacagatttggatatttttaatttccaggcatagcaatgttatctattttaatgtgtatttgtcacaataacagaacatgcaagaacaatcattattttattttataggcatttgattactattctagacttctggtatcttcttactaacataaatatctcaagtagaaaagtttttgaaaactaacatttaaaaattaatcagttacagtaaagactttgaaaaagaaatgtacttgttaggaagtagcttaattaccccccattgcagtattattgttatatatatagttaatatgttgtacatcacaataatatataattcagtctctagtttccctagagtcatttttgaaaccactgattgcaaacctccctgacaatttttaaaagtagtaagccacattacatttatctttgtaaaaagatttatggtaactggtttcttacttgacttttataaatagtattttacatcttatttttgcctttatttcataagtaatttaaaaatcactggattgctttattatattcagggcaatatggattatttttataccaaggatttgcatcgtgaattacattaagttatttggcaatttataatttattactactttaaatcaaatgtagcattatcacactgtatttaaattgtcattttttaaaggaatattttcttcttaagatatatagaggattttggagaagagagacaggaggggtaaaaccagcttaaggttcagcgagcagaaagggacctgagaggatgctcactgtaagactgttggacagtggtgtgtattgaggggatgaatcggaacgatagtctcatgcagaaaatagtgagattaagatcatccttattgtttctaaattatttcaatcagatgaaagtgatacgattgaaatgaaatcacatagttcgtgctcagaaattctattttggtatgtttgtattagcctttagaaaaaacactccgtttcagaattgttcacagttttatttcttaggtttttagagttcaggatttcatttattaatttcttcttgcttttttggtggaaataggctttgttgtaaacattaagaatataaaatctcctctatatagaaacaagaattttgttaaaaagagaatttgaatcccttcctatactataaaatgctctatagggagacaaagtgtttcttttttcttttatgtttactgtttatgtggagtgaaatataaggctcttggatgtataacatactcaaaagctgttacactttctctgatctgctgtgatccactgaaaatgtgctggggtttgttctgctgtcactgtttatgctgctggaacttagcactgtcttgatttgaagcatatgattgagagccatttgaagcaatcttcattaatgcagataaaacaagtttacatgtgcagagttagaaaatgacatgttcaattctgtaagtggtgactttttgagcacctttcagtattatgtatttgtaaaaaccattgtttttggatataaagctaataagcactttaaaaaggaaaaggcagcctttactattttttctggttgagtcattgctctttagacctagcatcagcaatagatttcaaagataagtattaagcgctaccctaaagtgtgtaagtttttcattttgtcatattgaaaaatgatttgcatagtactgaatgttgacacacagcttatatgtatttacaagaatatctttaagtgtttttttgacacattaaaataaaggaaataaggaaattgtaagctttatttggatttttaaatacatttttaaaatttcagatgtaatttaacatcacatttgtttttcaggtattgagtttagatgcctacttttatgagtaccatcagctggacacagtgtctcatacctgtatttgcagcactttgggaggctgaagcagatcgctggagcttatgagttcgagaccagcctggacaacatagtgaaacactgtctctgcaaaaaatacaaaaattagctgggtatggtggtaagtgcctgtagtcctagctacttgggaggctgagatgggaggatgtcttgagcccgggaggtggaggttgcaatgagccaagattgtaccactgcattccaacctgggcgacagagccagaccttgtctcaaaaaaaaaaaaaaaaaaagaaaaaagaaagtactgtctgtcttaaattttgctgcaaataaaaatgtactttggatt

SEQ ID NO: 12856 - DNA, 1284 bp, Homo sapiens
taattaattttttttttttttttttttgtagagacagtgtctcactatgttgcccaagctggtcttgaactcctgagttcaagagatcctcctgccttagcctcccaaagtgctgggattacaagcataagcaccacacctggctgaacatcagatattttaaagtgtagcccagagtctagttggtaaatgttacttatattgggactagtattttctaatgtttctgggatatgctccctataaaatgaaatgttttcctggaacaatgctaattaggattgcattcctggccaaagacatgacatcaaataagtaatagacatcaccagcaatgaattttgaaaagcaaaaaatactattaacctatataaccatttaaaatttaaaaaattatgttccaagtacctctattttctgagctagaagaaaccttagaggccatctgatgatagattcccagagctggatggatccctagggactacctaatctgactttctgtccactgcatggattcttctaaaaagtatgtcacttatttccctaccttattaagactaaataagtggaacatcatagagctctttatttataacagtcattctttgatagtcaactcttaaatggagacttgagatgcttaaatattgtactactgtgcttatcttgtaaagatttcataaaatgatagtattggttattttaaaaaggctttggcttatgctgaattatacatgtagcaccaaaatgttacaactctactaaatttccttgttctaaactattatattagctataataaatattagtcatacatgtaacatgtttaatgacaaataactttctttatctccttggaattaaagagggcttttaaaagataatttgactgatccatgcttcttacagtgtggagctttgcaatgatgattttttaaatatgtttttcttgtgataaacaggtattttttaaaatctgctgggtgtggtgactggtacctgtaatcccagcactttgggaggctgaagcgggaggatcacttgagcccgtgagtttgacaccagcctgggcaatatagtgagaccttgtctctacaagaaattaaaaaactagctgagcatcatggtgtgtacctgtagtcccagctactcaggaggctgaggtgggaggatcgcttgagtctaggaggcagaggttgcagtgagccaagattgtgccactgtactccagcctgagtgacagaacaagaccctgtctcaaaaaaaaaaaaaaaaaatcca

SEQ ID NO: 12857 - DNA, 15024 bp, Homo sapiens
aggctgcagagaaggaagcagcccttgtgcagcaagaagaagaaaaggctgaacaacggaaaagagctcgggctgagaagaaagcgttaaaaaagaagaaaaagatcagaggcccagagaagcgcggagcagatgaggatgatgagaaagagtggggcgatgatgaagaaggtaaggagctcttgagaaattgtgttttgaaacgtcttaaagttagagaagttgcgaatacagtatgaagaactttcttccctgaaccgttaccagcttgatacccattaccctttgatcactgttagggtgtatgtcttgcaaacaaggggccctcttctacatgactagaatgcagccatcagagccggggttagcaatgagctatgggttcccatttatcctgataatgtcctttgtagtgaaaggatccggttcaggatgcactattgtgtttagttgtcctgtctcctggatctccttgagtctggagcactcctcagctttttttttttactctgatgacctgcagtcttgtaagggggcaggccagttgctgtgttgtgcccctcagcctgggtgtgtctgatgctccctaagcattggattccactcatgcatctcgggcaggaatagtgcacaagtgctcctgtggcctgcccattgagtcccatcaggtggactgtgattcgctttgttccatcactggtgatgacccttttgagaattatttatgctgattctctacttatcccaggtttggctagcaagagttccttcacacaggcttctatgtccctttgacctgtccccttgttctttgatcatttccttaccttctagcacacaatacccaagggtcatcttatactttccataactcagccctggaatccatcatttctccaaggttcctttgagtgatgagtggtatttagaaggtgctagttgtgctcactgctgttggttattgttctgaggcctgagtggtcgagggtagggagtgtgtgtgtgtgtgcgtgtgcgtgtgcatgtgtacacatatttatgaccatatttacttgtgtaactatttgtatatactgaaagtcatgatttcacaccaatacctccagttccggtctaacaccacagggttccccttcacacttgcaatgcccttctctctctttttaaaatttatttattcatttatttttgagacagagtctcgctttgttgcccaggctggagtgcagtggggtgatcttggctcacttcaacctccgcttcccgggttcaagtgattcttgtgcctcagcctctcaagtagctgggattacaggcatgcaccatcatacctggctaattttttgtatttttagtagagatcaggtttcgccatgttggccaggctggtcttgaacttgtggcctcaagtgatctgtctgcctcggcctcccaaagtgctgggattacaggtgtgagccactgtgcccagctgtgtcacgcccttctctgaccttgagaaacttggctccctctattctcagcatcctcagttactccacccggcccctgtaggtatgtaatcaacttcctgtgcctgcctccccttctcatatgtgccatccccaccctgtttggtctcccacacccggggccaggcacggccctgcatggacacccttgcttctttcactcaggcttccagatctaggctgctgggtccctgtcactgccccatgcctgcctgtcttcttccttccattcaggctctagcatcccgcaccactgctgcagccccaaccctgcacagacctgccaggcttggccctacttttttttttttttttttttgagagggagtctcgctctgtcgcccaggctggagtgcagttgcgtgatctcggctcactgcaacctccgcctcctgggttcaagtgattctcttccttcagccttccaagtagctgggattacactttgccagccaccatgcccagctaatttttgtattttagtagagacggggtttcaccatgttagccaggctggtcttgaactcctgacctcaagtgatcctcccgccttggcctcccaaagtgctgttattacaggcatgagacactgcacctggccttggccctgcttttaatggttctgacttagtggaattttccagcagtgtttctttcacccttgtaatttcagggacgggcagctctgggtcatatttatttcagagagtcagtcaaggtaaagaattgtctctggtggctgggcgcggtagctcatgcctgtaatcccagcactctgggaggctgaggtgggcggatcacctgaggtcaggggtcaagatcaacctggccaacatggtgaaaacctgcctctactaaaaatacaaaaattagttggctgtggtggcgggtgcctgttttcccagctactcgggaggctgagacaggagaattacttgagcccgggaggcagaggttgcaatgagtagagatcatgtcgttgcactccagcctgggagagagagcaagacactgtctcaaaaacaaaacaaaacaaaaaaaagaattgtctctggacttgaaaggactctgtatactttcttaatacagatgtgtgagccagagagaactgggaatggagtcatccatcgttgagttgaccttgcttgcacaccttgtttgggctttcctaaatgactgaggatggctcattgctccactggcctcccagtttggcagaataaggcaaatgtgatgtgtgaccgcagtggtgtgtgatcagggcatggcgtgtgatcaggactgtgggagatggcattgttaatactggtggaggccaaagaaggcactagtgggtcaacttcgtaccaggaagactgtgggggaagagatgcggcatccagggggaagaccgagtgactgtggcagcgagaagggaaggtctgagctacacagggaggagccaatgttagtacagcctgaaggcacagcacagcctggcattttctgtgagcagcagataattgggtttgaactcagatgcattagagaggggtggggcagtggtcgaggaggctggagtggtaggtgggccagtcagctggacccagcccagggacactcttgaatacagtagcagtgtgcagggcttacgttgcattggaaaggcagcgggtgaactgatggggaggtctgtttgccggaggctgatgtctgttgagcttcagtactggccctctggaggcagtggtgaggacagactgcagtagaagattgtggttaagctctcttaaggacacaaggccatattgaaagtgttttagaaaccacagatcctttgtagtgctttccaaaatgtgctccctggggcacgggtatcagtcactagggtgcttttccagtgcagattctcatgtcctatcccaaccctgctgatctgggctttgtaggagaggggccctggaatttgccttctgaactttgagatccactgaccttttgtataattaagagtggacaatggggatttatgttattacttccacttgattgagcccacttacccgagtgtaattggggcacagaaagtcgtgggacaggtcaggcggatcacaaaagacttctcggggtggtgcttgcccctccgagtctggtgagggagtaagtgtcacatgcagctgtcacagcactttcacttcacacctctgttcaagctccctgaagagaagtaacagttaaccatggctacttttcttttgaaaacctgtagagcagccttccaaacgcagaagggtcgagaacagcatccctgcagctggagaaacacaaaatgtagaagtagcagcagggcccgctgggaaatgtgctgccgtagatgtggagcccccttcgaagcagaaggagaaggcagcctccctgaagagggacatgcccaaggtgctgcacgacagcagcaaggacagcatcaccgtctttgtcagcaacctgccctacagcatgcaggagccggacacgaagctcaggccactcttcgaggcctgtggggaggtggtccagatccgacccatcttcagcaaccgtggggatttccgaggttactgctacgtggagtttaaagaagagaaatcagcccttcaggcactggagatggaccggaaaagtgtagaagggaggccaatgtttgtttccccctgtgtggataagagcaaaaaccccgattttaaggtaggtttatggaaaaaaagaatgcctttcatctgtggttgctttagacaggcactttcttcctgcagcagtgatatttaggatagacatggaagttttacgctctgtttggatctaaacttccttgtgagccaaggtccatcctgagccggttgactgaggtctgactcatggcatggctccttcttgctgggtgcttagcaatgacaagggactgtgctgaatgctttatgtgtgtcagctcattgactcctcatgagactctgtgaatggttacttttattcttgccgttttacagaggaagacatggaggcctggagaggttaagtgactcgctccggtggccccattaacaagtttcagagcatggcttggctctagtctgcctggctgggctgctcatggggacaaggctggtgtcagaggagtcaggtgagctgggtcatgcctcgaatcatggtttttctctgtcttccttcttcctataggtgttcaggtacagcacttccctagagaaacacaagctgttcatctcaggcctgcctttctcctgtactaaagaggaactagaagaaatctgtaaggctcatggcaccgtgaaggacctcaggctggtcaccaaccgggctggcaaaccaaaggtcagagtcagagcagattgtgccttgtcttcaaggcttgggcaaacttcgtttctgtatcggttcaaagatgatttaacctctagaatgggttcctagtttgtctgctgagaaacaaaagttaatttcacagaaagatctgcacttagctctacttatatttggagtcagattaacctgtttgtagttaattgtactaaaaagaataagacacttggaaatagaggatcatgaattcaccacactatggcccctggctgtggggcttgggggaagccctgtgaccagcagcatacgggctttggggtgggcgccctcctgcagccttctccctctgtcccaggcctctctttctctggggcctccaaccaggccccttgagtccctccattgcagtgcctcttctcctgtctttccttcttgccccctcagtctcctgctaagtccttttgtgccccattttgagtagtaagtggtttcattactgtctacccactgcccactctccctcccctttatccaggttaatggagagaaaaagaggatgaaatgagggagcgggtgaaggcacagaaacacgagggctcacctgggcacctgggctgctggccctgtgtcccatccacctcttggtttatttgctggatttatactggtccatctgtctttttccttctttctttctacttctgcagcacgtacaaggtgtgctgaacttggaagggttatctgaagttacagtgcatagcagcactcgggaaggagagtagggtggggaaataagcctgtagacagaggatgcggtggtggggaaggtaacctgttggtgggtcgtttgctgtggcctggtctgctggtctccgggaggaagcccagtgcctgccctgcaggaggaggttgcgtccctagtctgcgggatctgacttggttctggatcttgcctcttccagggcctggcctacgtggagtatgaaaatgaatcccaggcgtcgcaggctgtgatgaagatggacggcatgactatcaaagagaacatcatcaaagtggcaatcagcaaccctcctcagaggaaagttccagagaagccggagaccaggaaggcaccaggtggccccatgcttttgccgcagacatacggagcgtaagtgcttgcatggtagactagtgcaaacttcgtcctggctggcaccagttcatggatcacggggggattaacccgggatgaattagcttcctgttaggacagaaaagccaagatgtgctgttccttgtggtaatcactgtggttccactggagcaaggcgtccagagcaggatgcaagcctaggcagtgacctctgcctggtactggccaatttacacttgtcatttatttcagacagaaataaggcagtgattattttaaagtcccctttgccagttggatctgtgtgtttacaaagaaatctcatacccatgtgtgtgccagtctacggccctagctatgatccacataagctgtgctgttcgctggtttgggatgaggaggagatagcagaattgccaggtgactggtgaggtctgagaggtgatagtcacactgatcccctctgagtgtgactggtgctcagggttgatctttgccaaaactgaacaaggccaagtctgttgaagcagtttttacttcataaacagaattaaggaggcagggattatcttatcctttttttttttcaccttttaacttctggttatattaaaactgtcttggcttattttcacaaataaatgaggggccacgaattgttgcttcaaaaggtccattcagtgtttgctcttttaggagggggaagggaaggacgcagctgtctctactgcctcgtgccctgcagcgcccaagtgctgcagctcctcaggctgagaacggccctgccgcggctcctgcagttgccgccccagcagccaccgaggcacccaagatgtccaatgccgattttgccaagctgtttctgagaaagtgaacgggacgctgggagacaggaaatgccttacttcactctggcccggcggacctcccaccacccagcagtgcactggggatggacaggcctggtgtgctgcgtgctcgcaaccacagatggctcctcggctttagacagaaaggggaaggggttctaagtcaagagcctttcagtgctccctcatattgagggcagtggcagaaaagtgaccactctgcaggctgggcccaggatgtggtgtcctgagatagttttgtatcttaaagactgaggcacagaagcgaaacgagaacacactgtttttgagacacagttgtccaaatgtttctggccagctccggcccctttttgtatgacacttctcttccaccctgcacagcacatgtgcccgtcattcttttaattttaaaagatgaaatggcagatgctagtaattcacagaatggcctcttgtgggggtgggtctgagggaagtcagctataaaacatttgctggagttttgttcaatggggctgtgcatttttatattatgtgtttgtaaatgacatgtcagccattgtttcatgtttcctaaaagcagaatatttgcaacatttgttttgtataggaattatttgtgccacctgctgtggactgttttctttgcctagtgactagtgacctgtgttgtctaaacatgagtttcagccctttggttttgtttaataccatgtcaaatgcaaacttcaattctccccatttagctttattaaactgacgttctcttcaaaacttcttgctgaatggtactcagatgtgcattcacatacagatgtgttttgaagtgggtgtaccttgctttacctaatagatgtgtaaatagaacttttgtaagtcaaatcccattgtcactttgatttaaattattccagctgtgatgtgtcttcattttatagcagtttgacactggagcttttgagcttttttacctcacatcttttatcaaataatatttactgctttgaaaacagcaacagcattggccagttcagtaggggaagcttgctttattaagacactctggagaaagacgtcagggaatccttgtatatgtcgtgggaatcaactcctcatttatctgttgcgtaagtttaagtttttgtgcatcagtcgggttttctatatttttttaacttaacattttttaatataaccgattaaaaagtagacagaacagtaaaataaactcctgtgtgcctaccattcagcttccagcattcctcaactcccagcccctcttccttcatgtctgtttcccctccaccctctgttatattgaggcacgttccagatgtcattgtgctcatccagtaatgttgcggcaggtgtctcaggaggactgaaaggccttcactcctagaaacattagtggtaatcccttcatgtcatcaactgtccactcaaatttccaccttcctacaaatatcagctctcctccctgtaaattattggttggtaagcctcttaagtcttaaaaggtaggttcccctccatctcttttttatacaaaaccaactttttactaggctttacttctgaattaaattcaagcggcggctattgacagcagcaagaacctttgctgtcccacgcgttcctcctgcagtgttctctgtgatgctgcttggaaggctgatggactgttcagctggtgtgatgatttgggtagctcagagccctcatggttggggacctgacacatgaagagccctgaatatcactatgggtgagtgtggccttactttttgctgcttcacattaacggtttggctttgcctgcagccagtattctgaccttaatgtcacacttgcagatgtcagcccaggcttggtacaggggcaaaccttttcaggcttgagcagaacccagttaggttccgggtgttgactgttctagaaatggatttccaggactacatgagtgggtttgtgtgttttccccagaaaatccagaactgatgataaatagaaatgtgaaaaactacttcagttacttgactgtttgttagtaaaaaaaaatcagtaattcatccttgcccacctaggtaggcggtttatccaacttctgggtctcttgcccatggaaatcaccatcttggatctgttgctctcccagaacagtattatgaatagggctaaaggtcagaatacccccactgcccttatgacagatgggaacatctcccaaataagacagtctcaagcattcatgtaataaaataactttattagaatcaggaatttgttaaaataatatccttcacatatagctaaagtgcaaattctcttgctctgtagtagaagcaagcacatctgtcagacctccgtggtgtgcttataaaaccaagacgagaagagttttaagaagtacctctggcagcataagagtacgaaaacacattttataaaggtttgaacaattatcatttggagccatttcatatatcgtgtatgtcttttcacttatttttcttaacctttcaaaaactactctgtgctatttatacaactgaagaactgtataaactactttagagcagtggcctcattactgtcaggaacggaattaccaaatcaaagagacaacactgcgtattcgccatcactcacacactgacaaagtgcagtagtgttagacatcatgggctctgtcactgggaaagggacccagtgacttccacctctctgactctaaatagcagcagtcatattggcacctgtaccatatgattcaaagagaagattctacttccattggatgacagcttggaaacccggccatattacatagagcactacatcatttcacaagttgcgagaaaaataaggccactccgaggcaatctcttctgcctcccagggggatgggacacgggacagtgcaaagaccgtggaagatggcagtaagtagatgaaactccaggaccaaagggatgcagcctggccatggctgaaggtttttgctccattcagtagaaactggtgctctaattcattatcaaaaatgcttacttggtgtccacatggcacttgttttctcaggttaacatctgcctacagaaaactcaggcagaggggtgagggcagatgcctactagcataacacctggtttgcagcacgatacaggtggaatgacaagcccagagaatttcagacgaaaacatctggcctgagttgctacaaatgaagtgtgagagaaacgcggatacacaaagaaaaccaaactgcccgcccaccatgtttccccctccaacatacagctctttatggctaccccctattcttaattagaaaaatagtctcaatatgaaaaaaaaaaaaaaaaaaacagctgctggcactaaagtttgcaaactatggctcaaaaagtcttcctgcaggtaagtaaggaatgtcggcattcattttctcttctatgaagtttgcttggaagttagtcaccactaatctaaaccttgagaaagtgagctttcaaccatttctctcagctgcgacttgggtctgacttcccagttgcagtcacagaacctctcagcctgtttcagagaagcacttggaggagttatgtcagtggctctgggccccgtcccacacctcttggccgctcctccaccttagtgcaaattctgctccagaacctttgttctggtcacatggtggcactgttgcccctaaagcacggccaccagcaagacacagcagacaccatacaatactgactagcttgctccaaagaagaaaataaatagcttggttgaattataagttattttagagacaaggcttcataacttagtttttttttttttttaaaactaaaacatttggaggtaaagaatgtttctccttttgctttaggaagtgactaggtttctagaaatgctgtttctttttttttttcctacctcaggacagcctttgtcactgaggatttctagggttagggcttcacaggaagcgtctccttgaacccagagtggttgggttgggcttctggcagtgccaccgagtactcagttgtggcaaaaagcagggtgtccagggtggtctcagtacacttggcgatgaagcgaatgaaaggcctcacgtcgccctcgttggcagcttccaacacgtggtagtagtcggaccgctgctccttgcggatggtgatgggcgggtagcccgcctgcatgaggatgaggttcatgagcagacgggaggtcctcccgttgccatcaatgaaagggtggatgtaaacgagtttataatgggctaaggctgcaaactccactgggtgcaggttcatggcttcctcggagttgagccactgtacaaactcctgcatctgcttttccacatcctgcggatggggagggatgtggtgtccgaccaggacctgtgttgtccgaaacctgccggcttccacggggtccacgtagcccagcacccgcctgtggatctccagcacgtcgctgatggtgacggagccgatgcgcgaaaccagagtcgtgttgatgtacttcatggctgcatgcatgcctatgacctcgttctgctcctccaggctcttcccgggcacggcgtagcgggtctccaggatgtgcctgatttccgagagggtgagggtgttgccctcgatggccactgtgtggtagatgtgatggtagtaggtctcctccatgaccctgcgcagagctgagttccccttggggatggacatgaccttcttcactttgctgtcgatgatgctgaaatacctctggtcgatctcttccacaagaggcagtgtccgatcgcggttgaccagtgctttctcatggtagggtgagatggtcaatgctctggtgtacaagtagtccgcctggatgatgtccttgtcttcttccgagaagatgccaaactcggtgagcgcgtccacgaagtccgggtccatcttgagggcgtgcatgaagagcttttgggctttttcccgcttgccctggcgcttcatctccagggcctggttcagggcagctctggcttccaacttacccgctggaagagagccaaagaagcgctgtgagggagggaggctagggggcagaggacattcggggggctgtcccctgtgctggtctccgcaggaaaccatgatgaccagcctgtgtccctggccttgaggagcttgttgcagccgcatcgtgtgtactcaacatgcccggtaccactctgttgccccagccgtgtggtggtatgcagtcactatccgtgtgtccccagagccactctcttgtattctgggaggcacctccttggcttcctagcctcctgctttctggacatagaaagttctaggcatttacttcgcctgggccctctctgctgggcctttcctgtgggccacagctcccagtgtaggccgtctcctacatctccagctcatcttgtgctggtgacacaggttcctgccccgggaggcccaaaggcgttaacaactccccactcttcctagaccctgggggcgtcaaccatcccgggactgttctttaactcttttaacccagtggtttgattgtgcgccccaggggacatttggtgacgtctggagacctggttagttgtcataactgaggaggtggagggagtgctacaggcatctcatggggagaggccagggatgccaccaccatctaacaatgcactttcagtccccaccacagagaactggtggaggtggggagcctgctctagccctagccctcctgtcctggcccctcttggccacctgaggatcagccccacacattcaacttcctttagttcctcgaatgcccccaggctctcttacgacagttatgtcagttatgacaactaacctctggtctctgcctggagtccttttccttggatgcccttcaccctggatgactcctacttaacaactgggtcccagctcaggtgtcacttcctccagggagccttcctggtatgctcctacagccctttatgcttccccatcaccacacttgtgacactgtctcagtcacatcaccttgtctatactaggagctcagggctgacttgttcacaataccccgatgccccacatacaggacatgacacattctatgtctgtctatccagttaacaagcattgaggaagacggccagtctgtcttacctggagaggccttggtcttggccaccagcagcgtcgcgcccctggaggtgatgctgagctccgtggacgggctggtgcacttggtggcggcatgctgcgccctgtccggtttgctcctgagcaggtagaggcctttgagcacagccaagcactgctcctccacagcccccagcggcagcagcagggccagcagggaccccagcaccatgctcagcagcgtcacccagaggaagcggctccagaccgagacccatttcggttcagtcaccgccatcactgaagccattggtatgagcatcatctggactcaggagagggccctttgcgcatgtccacaggcggctgagagagagcaggatctgcaaggagccaagagtcgcaggagaaacagacacgttcaggacatagtgtgacttcagctgggaagatgggtttggagacttctgctcttttagctcactagagagatggggtgggggcaagtcaaggactggatctcactagaggaggggccagcctagaaggactggtgccacctcctgggcagtatgaatgtgaaaacactgctgtggtccaacaattaatgagcacttgccataatccaggccgtgtgctaagcaccaaatgcctcacatgggtcacctcctgcaatcttcaacgacttgagctgatgttttcacccttctccaggtgagggaactgaggttcagagaggtgaagtcccttgccgaaagtctcgccgggagcaagtgacagccttaggacttgaactcaggaaccccacggctctaaagtgtccccccttcccatatatccctgtggcttctgaccacaaacactggatttgtggacatatgtcaaacatttgggacataaatgactgacagacacccaggcagatcagccacagcagttctgacgcccaatctttgataagcacaattgttgggtggcctcatttattgccctcaccctgatattcagccacagctcccacagtgcccttcccctctctggccttccatttctggcctgtccagaagggaccccatcaagaagatgagcagttcgagcatctcgaaaggaactcaggctgtgggccacagtgcttggcctcagtgacaacatggcttgtatgtgcttggggctggcagtgggagtggaggtggggccaggcatgcaaacactatgctaacaataagcacttattaagcaactatggtgtcctaggtgctgagcagtgtactggccacgcattgcctcgtttcaccctcatgccaccctatgaaggaagagctaccgctagctccattttacagacaagggaaaccaagacacagagagcataagttaaattccagaaggcccacaggaggtaaacagaggcatccggaaggaaaccccagggcctctgaacccggtccccaggtctcgatttctaccttattactaagcagggcctgtgcacctgctctgggctggtcctgacccgggaatgactgatggatcacggggttctgagtctcatggggatcctggcccattgccacagaacatgtgaaatggcttggggtgcgctttaataggggtgcgcctggagtgctgcgcgggtccaggggtctgggcgggcttcccgaggggacaggctcctgggcggggcggtacaggaaagggggcagttcgccggtgccaggggtgtgtgcagggaaggagtgcgttctgggaggcgcgaatctctcccccacacttccctagaaagggagaactgaggcccggagaggggaggggaccggtctgagtcccctccaagactgcagagcctcccttcccgaaccccgcccagggctcgcggccccgtcgcacccttcccggcttcatcctctcgagcccctagggcttttccccttctcaccgcgcgcagctgtcagaaccccaaccgccttccccgcgctcccagctccgggccgccggctcccgggtcctcc

SEQ ID NO: 12858 - DNA, 33927 bp, Homo sapiens
agttgtctatcaacgtctatgactacaactgccatgtggacttgatcagactgctcaggctggaaggggagcttaccaaggtgaggatggcccgccagaagatgagtgaaatctttcccttgactgaaggtaagcttcagcagtcaggctgcttttagaaacagaaacaaggcttgcacattttttacaatgttgaaagtgggacatgctccttgtagaaaacctggaacgttcagtgtagtggaaagaagaaaacgcatcagagttagctatttttagtttattgtagttttttgcaaaatgtagttatgatcatataacacggattttgaattctgatttctttattctaacgttgtggtaaacatttgtaatgtaattaaacttggctttcatttctgtatttcccatttcactatttatgtatttaaaccattctcttgaaaccagaaaattgtaaatatatttaaacttttacagacagttttttatgtaaatgtttcatacattaattgttccagaatagttgggcatttaggttatttctacttatttgcttattagaaacataattgcactgaacaactctgtagttcaatcttcatgaatattaataagtgatctttgggcagtacttagaacactttggtcctagatcccactctgccccttttcccttctgcaaagcataactgccgagtgtagatgctggagtcaggtgacctagattcattcctggctacatcttttactagctgtgtgaccttaagcaaattatgtaaacattctaagactcagtttttctagcagttaaatgatggcaacagtagtttctgcattgtaatgtatgacggtataggatgagctattctacgtataacacttaacacatgcctggcatgttgtcatccttagatagatgtcattattattagtgttactatcaccaaccttacaggattgtgataaagactgaatgagaaaagtgctttgcaaaatataaaatgcctaacaggtggaggatattatgattttagtgatttgatcttatttggaagcataaaacctcctatgtgcttagttcaggttttaagaagtgaatttctggaaacaacgccaggttgtgtaagatggatgaaacgtttgcatgctgatgtctcttggtaaagtccctgcgcttagcctaccctttggtattaatgcgggaagtatttttgtctcgtagagctctggctggagtggctgcatgacgagatcagcatggcccaggatggcctggacagagagcacgtgtatgacctctttgagaaagccgtgaaggattacatttgtaagttcccgtggactttttttggatatctggcaatgtcatatatatcagtctgctgttgaggactgtattatgagatgttgctacccagaaaagggaacgttagtttcacaattagcaagatttaagttgagttgtcttatcattgtctttggtctttaattgaggaagtttaattttaaaataaaagtggaagaagcacttgtagtaagggaatgaatacactcacactcaggatttattgacagtgagaacttacatggtatttccactgatcttttatacattcaataggtttttagaggttttggacaggatgctttaaaaaaaaagattaaaacattaaaagaaaacctttttattttgaagtaattatagagtcataggaagttgcagaaatagtacagagaagtcttgtgtactcccttcacccagtttcctccaatatcttgtttctgtaatacaaaatcaaaaccaggaaattgaccttggaacaatgggaaaaaaaagacattttattacatgtgtagattcatctaaccactgctgcagtccagatacagagctgttctgtccccacagagacctccctcgcctgctggtattgacatcttaccagtgcaagtgaagtatagaagactcacctccctttaagtctctttaccgtcccttgtatatagtataattgtcttaaatattttctccatgtgaattggggaccacatcagacaatgctgtggacaaaatgcttttaaaaagcgttttaaggctgggtgtggtggctcacgcctgtaatcccagaactttgggagaccaaggctggtggatcacttgaggtcgggagttcaagaccagcctggccaacatggcaaaaccccgtctctgctaaaaatacaaaaattagccaggcatggtggcacgtacctgtaatctcagctactcaagaggctgaggcaggagaattgcttgaacctgggaagtggaggttgcagcgagttgaggttgtgctactacactctagcctgggcaacagagcaagattctgtctcaaaaaaaagcattttaaggccaggcatggtggcttatgcctataatcccagcagtttgggagactgaggcaggcggatcccttgagcccaggagttcgaaatcagcctgcccaacatggggaaaaccccatctccactaaaaatacaattagccgggcggggtggcatgcaggcctgtaatcccagctactcaggtggctgaggcatgaaaattgcttgaacccaggaggcggaggttgcagtgggccgagattgtgccactgtactccagccttggcgacaaagtgagactctgtctcaaaaaaaaaaaaaaaagcattaaaaaaatttcccctttcagactgggcatagtggctcacgcctgtaatcccagaactttgggaggctgaggcaggtatatcacgagttcaggagattgagaccatcctggctatcacggtgaaaccccatctctactaaaaatacaaaaaactagctaggcgtggtggcatgctcctgttgtcccagctacttgggaggctgaggcaggagaattgcttgaacccaggaggtagagggtgcagtgagccgtgatcatgcctctgcacgctagcctgggcgacagaacgagactgtgtctcaacaaacaaacaatttcccctttcagatttcgtaccctcttccttgttgatttcccaatgggagcagtccccctgtgagaagcattgctactaaccagatagactgttctgagatgatagagaattttttgtgtatctttacaagccaagaagaattcacagttttttggtttataatctgaataatgaaaataagcggtgttttatgaatataaaactatattatatgtgtgtttttttttttttttttgagagagagtcttactctttcgcttaggctggagtgcagtggtgtgatctcggctcactgcaacctcccccctacccaggttcaagcgattctcctgcctcagcctcctgagtagctgggactacaggtgcctgccacaacgcctggctaatttttctatttttagtagagacggggtttcaccatattggccaggctggtttcgatctcctgaccttgtggtcctcccacgtcagtctcccaaagtgctgggattacaggcgtgagccaccgcacctggccaaatgtgtttttaaaaactatacctgtatctctgctctgtggcccatgagtcttcttttagagccactgataattttagcagtgcatggtgttcccatgatttctgatgatcctgttacccccttcttactctctcacaggcattgttaatagcaccatttatctttttctgaggatctatggtcttccccagactgtaatgttttttagtcctttatggtcatctctgctgttaggccttcactgtcatttagtgctgctgtctgagtacttttttggtaggcacatttcgtttgttatgcatcagttttgatatttgggtattttatatcccaaactaattgaacacttcttatttttaggtcctaacatttggctagagtatggccagtactcagttggtgggattggtcagaaaggtggccttgagaaagttcgctccgtgtttgaaagggctctctcgtctgttggtttacatatgaccaaaggactcgccctctgggaggcttaccgagagtttgaaagtgcgattgtggaagctgctcgggtgagtacctgtggttgtctctgaacgggttggggctgtctttgtaagtctccttggaaggattattttgaaacacatgtccatgatgaatcttgcagttcatatagttaacaaaatggtctttgccaatcccttagtggtggggtgatagataacctttttttataccccttctagcatttggtacaatatgtatggaagaggtcgtataaatttttttagcttgaactgaaaatttgttgagatattttttgaagtagaaagaaccagagttggccaagtgcggtggctcatgcttgtaattccagcagtttgggaggctgaggccagaggatcacttgagttcaggagtacaagaccagcctgggcaatgtagtgagtccccatctctacaagaactaaaacattagctgggcatgatggcgtatgcctgtggtcctagctactcaggactctgaggtgggaggattgcatgagcctggagtgtgaggctgtagtgagttgtgatcacaccaccacactccagccagggtgacagcaagaacccttctcaaaagaaaaagaaagaaccacagtttgtcatttactactaatttgcttctttagcccgtagctggcttcctttccccttttgaccgggaacaaacctttgattcacagcttgagaaagtccacagtcttttccggcgacagttggcgatcccactctatggtaagagaaactgacatgtcaacagccagccctctatggtttttaaaatgctttggggaacaacatgtagttagacctttcccaccatcctgtgaggcaggtaaagctggtgttcttactctccttggatattgtctctttggatgaggtccttggtaaaaacatcttgaatgttagtgcttaagagggttgtgagggtcagaggcaggactggaagccagactccctgactcccaggtgagagctcttttctcctttgagacctagttggaagggcagagatagggtctctgaaaggaatagtgaatgacacctgtattttttggggaaacttcattgaacaagagttccattataatcattttctcttcacaagtaacctcttccataacagcaggaattttacatgagtttagatcattcctctatgggagggatttggttcagaagtgcagttgattggaagtactcataagtgagtttcttggggtttggtaaagagtttccttatttggtaaatacattttggcaatctaagcctttgagtctttggagctatgagtgtgtgcgtgctgggaggatttttctgagtatgggaagagtttgtcatggctgttgtgtttgttccctagacacgggcatgtgttgtacatactcagaacctctgggcaactttactggagcccacatgttatttctcttcatggtttattggatttaacaagttataaagtagtcgtctaatcaaatggttgggtatcatgcagaaaacactagagctgagccggcttgcagatttcacctaccagcgtgaaacaacctagcataatgattagagtgcgaacttgagccagactgcttgggttcacagccttgctctaccattaactgtagacgagcaactgaaccctctgcttcagtttcctcaactgcaaaatgaggatcacaatagactaccttgtagagtgggatgactgaatgagttagtggatgtgaagtggtagaacataggtaacactgggtaagtgttgttaaatcgttgccactagtgtcattgactgattaattagctgggagggttgcctgggacattgttttaagacagattctacagacaggtttgggctcagcagaaatcagaatttgatcagtaagagctgccatgccacagatgtgggaggggctagtggcacctgagtctcatggcttaatctgtgtttgggttgataaagcccaatggcaagacccacggggctgaatccatctttcaatagatatggaggccacatttgcagagtatgaagaatggtcagaagacccaataccagagtcagtaattcagaactataacaaagcactacagcagctggagaaatataaaccctatgaagaagcactggtaagtgttggcttcttttatagtaaacgtctctctacaaacctttccctgatggatagttgcgagttaaacagtatctttaaaatgttttattctgaaatatatagagtgtataaatgtatacgtacagtttacatactaataataaagtgaacatccatgtacctaccacccaggttaagaaatagaacattgccagtaccttagaagtctcctatgtgcccctctccgattgcctcctcctccctctcccgagaggtaatcactttcctgacttttgtgatgataattcccttgcttttctttatagttttacaagctatgaaagtatccttaattaatatattgtttaattttgcttgcttttgaacttttatatattggaatcatgctgtatattttattttcattgaacatgcttttgggttttactcatgttgctaagtataactccggtgcatttgttttcactgctgtaaagttgtctgtgtactgcgatgtatttatccatgttgctggatagttgggtcatttccaggtttttgctaggagaaggagcagcgccactctgaacattcttgtgtgtatctccttgtacacatgaaaaagagtttctctagaatacgtacttaggaatgactttgctggatcatagggtgatgttaaagtgttttccaggttatcagtttgcactgctgtgagcagtatctgagagttctcgttgcttgtgccaatcttggatattggtcatacttaaattttacttaatttgatgaatttgaaattgtagttttaatttgtattttcttggttactaatgaagttgagcatcttttcacgtggattggccattcaaatttttgtgcgtgttaaagtgttcaggctgggcacagtggcttatgcctataatcccagcactttgggaggccaaggcgggaggattgctggagcccaggagtttgagatcagcctggcagcgtagcacaaccctgtctctaccaaaaaaaaaaaaaaaaaaaaaaaaaaaaagccgggcttggtggcatgtgtctgtagtcccagcttctccagaggcgaaggtaggaggattgtttgagcccaggaggtcaaggctgcagtgagctgtaatcatgccactgcattgtcacctaagtgacaaagcaaaaccctatttcttaaaaaaaagtctgggccgggcggggtggctcatgcctgtaatcccagcactttcggagcccaaggcaggtgaatcatgaggtcaggagtttgagaccagcctggccaacatagtgaaaccccgtctctactaaaaatacaaaaaattagctgggcatggtggcgggcgcctgtaatcccagctgtttgggaggctgaggcaggggaatcgcttgaagccgggaggtggaggttgctgtgagccgagatcgcaccactgcactccatccagcctgggcaacagtgtgagactccgtctcaaaaaaaaaagtctttgacccatttcccttttgatgtatcttttttctaattgatttgtgggagtgctttgtcttaagtcttattttaggctgtatgtgttgcagattttctccccagttgtttgtcttttcacttctttttttttgagactggagtttcgctttcacccaggctggagtgaagtggcgtgatctcggctcactgcaacttccgccccgccaggttcaagcgattctcctgcctcagcctcccaattagctgggattataggcccttgtcaccaagccccgctaatttttgtatttttagtagagacggggtttcgccatgttggccaggctggtctcatactcctgacctcaggtgattcacctgcctcagcctcccaaagggctgggattacaggcgtgagtcactgcaactgccttttcacttttttattttttaacagtgtcttttgatgaacagttcttagtgatcaattagattaaaattctttcccttttggttgtgcttttgttgtgcttatttaaaaaatattccctacttagctctaatttcttctaaaagttttatagttttctgtttcatatttaggccctcatccacctgggattgatttttgagtggtatgagactgcgtctggtttcatttttccatatggagaaccagttgttctagtactgagtttgatcattccttcttcccctcactgatgtgcagtgccacatctgtcatagattagctgtccatttatgtgtgggtctttcttctggattttctgttctgtcccactggtttatgttacactgttgtaatgatgagagttataatgttttgctcttggatagggtgagtcccatccacctttttcctcttcaagaggatcttggctttttttttttttttgccttcaatgcttccatcggatttagaatcagcttttctagttatatttttaaaatctttttttttttaattggaattgcattgaacctggagatcaatttggggaataatttacatcttccaatctatgaacatatataggtttctgctacttatatcttgtctttctgtaaagctttataataatattataaatttgtccagtgtcttcaacacttgacctttagagtcccctgcaagggagatttgctggtaacagattttctgtgttcaaaaaggtctttgcttcccttcttgaaaattattttcttaggctatagaattctagaccgacaacagcaaaagaattctagacggacaatgtgtcctctcagcaattgattgtatctttctgtcttctgatgtctgttgttgctgttgagaagtcagcggtttgtataaatcttgcttcttcagaggtagtcacttttttgtctgactgcttttaagatctcattgatttggtttgctgtcctctaatttcactgcagtaggtccatgtgtggactggcttgaagttttttgggcttcttgactctttttttctatctttctttgccaacaataggattgtgaaggtcagattcttaatatacgtcaagccagcaaaaggttaatgtttacttagcttgccaccctcatttagattttgtccttagtccttagtatttcttgtttctttgccagtttgttgatgacttttaagaagatattatatttaatttagcagttttagttgttttgaatggtacagtgtgtctgggtaactaattcttcctcgttactggaaatggaggccctgaaacatcccctttctacatatggagtctgtgtgttctcttactctcctgcactgcttcatcctttctttttcatgtgtaaatgatttgcatgtacctgtgcttcccaaaacttcgatcattcaattatgtcatggccatcagcaaaatgtgcctgaagagaaaacatgtcgaataagatttttttctaaaaagaatttgattgtatgtctttggatcattaaacattcagcacagctgccttcatcttctgcatttatctacattcttccaggaactgatatttggaataagaaacctgaaatagcatcaggcaccaaaattttccagtttggttgtattaactctactcagtagcccaagaacatgacttctggtttggaagggtggttgacagtggtcactggcaaaggtgttgctctttcactcagttcctgattgatgggctacttaattccctgtggtctaggaatggatttagaaaagagtttatggagcctttgtagcgactgccatgaactggcactttggaccagatgagaagactcttgttttgctcaagaagttgtagaggccatagtggagtggttctgagagtgaggatttggcgattcatagttactgtagccagttttgccaaaatttattttatttgcagatgtgttgtgcttcctgccagtaactaaattcaatacaattttcctgtactccagttgcaggcagaggcaccaaggctggcagaatatcaagcatatatcgattttgagatgaaaattggcgatcctgctcgcattcagttgatctttgagcgcgccctggtcgagaactgccttgtcccagacttatggatccgttacagtcagtacctagtaagatcactgttctaatttcattttatttttgccaatttagaatctacttaaaatcagtaagagtgccaggagtttgttgcatacggccctactcttgcttttcctccatctgctttttctcctctttgccaactcgtttagaaagttttagtgtttcaagttatttaaaaatggtcactaactgtaagtaaaatgagcatattgtctgtgttgaggacttataacaacttgatatttttcttttaactttttattatggcaaaaatgtaaacatataaaagtagacagatcagtaaaatgaaacttctgtacccctcacccagcttcaacaattagtaacatttatagctttagtttactttgatctgtagtctcacctacttgtcccttctgtgttactttgaagcaaatccagaaatgatatttcgttggtaaatatttcagtatgtgtatataaaatatttcagtgtgtctgtataaaaggatccaaatgaggtctatccagtagggttggctgacgtcttttaaggctgttttaacctgtaagttgctcctctccttctcctccactccccttagtgatttttttgttgttgttgaggaaaccaggtcacaagagatgtttataaggacatttctttcatcacttggtcgtgctggcaatgtcttgttgatggtgaatgcttaataaagtgtaatttcctaactctggaattctttatcataggatcgacaactgaaagtaaaggatttggttttatctgtacataaccgcgctattagaaactgcccctggacagttgccttatggagtcggtacctcttggccatggagagacatggagttgatcatcaagtaatttctggtgcggatgtttttgtgggagaacttctaagctatttgtcccaagtgaaaaacagagagcggtgacaaagtcattacatcagtgttccctggggttttctttgggttatggagtgtagtgacaaaaagggctctgagtgagagatgaactggttatatttgtggcttcttagagctttttaacatgctaatattcattgtattttctaagaagttgtagtgttttctccaaacttccttgatctggaacttttcttgcagggcgtcttgtggaagaagttttttctagaacacagtctgtagagtgctgtagcaacttctgtcttcaacattcctgtctagctcatttcattctgttgcatctattagtctttaaagtcatgtagtgttttatagtcagtagaatgtagtgactttctattagtttccatttgaattggtaacaaatcctgacttttctccaactccagtaaccttcgagaaagctttgaatgccggcttcatccaggccactgattatgtggagatttggcaggcataccttgattacctgaggagaagggttgatttcaaacaaggtatttaagcacatgtttttcactttagagctgaacatgttcttaatacaacttttggcgagatgtcccagttccccagatacattgtgattgggcaaatgatgtagactaggtattggtgactttttcccccagaaatcttagcaatttctgtctttaacaagtcatgatgtggattgtaaagcaagagagtaatcgtttatactggctcctgccagcctttttagtcttagctctcatttctcctttcaggtctttttatttatcctaaatacttcttgaaataagtctgctgtgttttagaaaaatctttgtacctctgtgggatcctttgccccttcatgtccccccgaaaacaaccagaaaacccctaacttgtacttgcacactcatgtcagctgtcacctcatacaggtagcctttagccattctcttgtttgcctgtgtcaccccagctgggggagactcccccccacagcaccctgtgtttgcctttttcaccacgctgtccatgctctattctgttcaaatttctttctccccaactatgtgatgagggcaggaattggcaattttatttctgtgtcccttgcatgatgccaggtacatagtgggtctccaggcagtttcagcataggataaaaaataaaacaaagccaggctatgtggtttcctaaagcctttttttgcactttccgttagactccagtaaagagctggaggagttgagggccgcctttactcgtgccttggagtatctgaagcaggaggtggaagagcgtaagtatgccccagcctgtggttttgcccagttgtatttccttgtctgtactatttcctggttgatgtaccttttcagccagcgactatctgtctccaagttcctttctaattttactaattctgtttttgaaggtttcaatgagagtggtgatccaagctgcgtgattatgcagaactgggctaggattgaggtaaatgtttttgacacatctagcactttcatccatcattgtttaatagcatcctattaaactttaattaaaattgagtcagaatcccagataatggcctaagctctataaggatttatgttattacctaggtaatggtctaggctccacaaggattcatgttatttacctagcttgacatatatttgtaaatatgttggtgaaaatattagctcccagctagaagttgtgcagtaaatgtttagatgctaggtattcactcgtttacttctgtctctgcctctttgcttcatttgtgagagcacagtgagcgtgtactgtttgtcagcactgtactaggtgctgtgggaataagacagataaaattcctttgctagtaaggcttctatctaatgtagaagacagatgatttgacaagtaattagaggatatgatgacttgaatgtcattactgggtcagggacaccaaggtcagtaagacacggaacctcccttgatcagcaggtaggattgtaacaattctaatcatgttttctcctcggagggagcgtcagatagaagaaactaacatttgtcaggtagtttttatatgggatgcttatcttttaaccattttaaagatgagaaaactgagaattacaggttaagtaatttgcccaagtcacagtttgtaagtattagtagcagagtgtgcatttaatactagatcagtcttttttttttttttaacattgtctctcaaacacttgtagttaagcttgataaaaataaaaaacgtgactatctagtactgtcgagtaagtaccgtgcgctccctctctcggttctcaggaaacataggtagattagcttgtggctgcagaaaggctcaagtgtttgggctgggtcgtttaccactggagggaggcctggggaatgcccagggacatctgtaacactaatagttgtggggtgctttttatgtgtgtctgttggaagtgtgttgtatgatgggtgtcgacgtcataaggttcaggtctcctaacagcctgctgatgcactttaggctcgactgtgcaataacatgcagaaagctcgggaactctgggatagcatcatgaccagaggaaatgccaagtacgccaacatgtggctagagtattacaacctggaaaggtaactgatctcggggtggggagggaggcagtgcttgtcagctgtgcacctgtcttcactcctggctgactcctaccagcttggactagctccttagaactgggctgttttctttcattctgtctctttcagtagtgggtacatttttaatgggcagggctagagaaccagacatgatattttgtgcctggaactcttatagccatgcatttcttttaatttgtttttgtcttgatttttgggcatgatattttatttgaccttttggagctatttgttttttatatttgcttttatagaaaagtagaaaatactaaaaagctaagagaaaaaaaactcaaattactgacccagtcataaccatgacccattctttgagacttttctatgtttaaatttttttgtaatgaaaatgcaattatagcatgcatgtgttacaagcctttaaaactatttgaacgaaataagataggcctaacaatatttataacatggggaaaacataaagaatgtgaccaacttttcagtctgtcttgaacgttgttcattgcataacattgctacattgctgggttttcttttttgaagattttttccctatttaaaaaacactgtgtgcccaaattagaatatttacaaaaatatgtgatagaaagcgacagtttcttttcttttttcgggggaggtggggagtctcactctgttgcccaggctgaagtgcagtggtgcagtctcagctgcaaccttgcctcctgggttcgagcaattcttctgcctcagcctcttgagtagctgggattacaggcgtgcaccaccacacctggctaatttttggatttttttttttttttagaagaggcacagtttcaccatgtaggtcatgctgacctcaagtgatcctcctacctcggcctcccaaagtgtaggaattacaggcatgagccaccatatccggctaaacgtgacagtttcttacaatcccaccccagagataaccactgttaaagcttgttgaatatccccctagatctgcagttcacaatttttttggtctcaggatccattttccactcttaaaattggaggatcccaaaaaacttttatgtatgtgagttatatctattgatatttataatttataaattgagaaatctaaaaaacattttaatttatttaaatataacaaattatctaacattaatatcttttttgagcagtgactgttttccagaccccaaaataatatagtgagaaaagtggcagtgttttctatttttgcaaatatatttatttgcacattattctgacctaggagaagacagctaaattctcatgtctgttactgattctgtctgttgtgatctgttgttttcattgaagaggttaggaaagaaaggtattttagaagcattttcagataattgtgggtattcttctttcatacatattatagcaaaacttcagtgttgcatgtggaatctgaaaccatattgacagagtctgttacagtaatacccatttgtctattttatcttttacttgatgccacaattctacgacattatttggaaaaatcccaattcactaaatcatgcagctcttccaatgttgacatatttcatcctatagtattaaaaaatcgtatttgttcatatctgtattgatcttagttgaaaagtattttaagtaggaagctgtcagacttgtggtggcagatacaagttttccaaaattctaattttcacttgaaagcttgaattctatcacatgcaacaaataatgtcagtggttttccccagagtggcagcctcactttgttaattttcaaaaatgtctgccaaatacccaggtctgagtaactgaccgtggtttgtcactcaagtttcctttcaagtaaaaatggtgtccttgaaaaaaatgacttgattagcttgcaactcaaacagtaatatgcttttttttttttttttggcaataaccattgtacttcagtatgcagaagggctttaagtgtacttagtatttcatcacacagtgcattaaaaagatttctactgccttgatttgtgctaagggccaccattacttgtgcactgtcttgaagatgtcaacacagtgaaaaagtccagtaatgtcttggtattattataaaaggagttttgactttgcagggcccctgagaggctctgggagatcctcaggggtacgtggatcttactttgagaaccagtgctctgaatttattctgagcatcataatatgtatatataattatgtatatttaaaatgttttaaaaacaaatatgaatacactgttgcataacagttatgattagcagaattgtgtagctgttgtgattagcagtgtacaaaaaggatctgtttgcgaccagccttgccaacctggtgaaaacctgtctctattagaaatacaaaaattagctgggtgtagtggtgggcacctgtaatcccagctactcaggaggctgaagcaggagaattgcctgaacctgggagacagaggttggagtgagccgagatcgtgctattgcactcccacctgggtgacaagagcgagactccctttcaaaaaaaaaaaaaagatctgactctgggtatgaaatttgacactaccctggattcataactctcctgtcagtaggacgccatagtaaaatttccctggggactgtatcaggttacagagagctgttggactcccccgccatgtgccgcacatgtgaatgctgtaaaggcagaatgctggttgcagatcacaatatcaggtacactttccagtagcccctacatggctgagggagagagtgcttcagggaaatacttcgtaggtgactgtagagactctggaaggagaaagcatcatggatagatctgaaagctaaggtcttctcagaagctagagttactgaagagtgagtttctacctgggagaagacggcctctcccttcgagtgccttccactttgtgtcctggtggcagcaactttttgttttctgccttagagctcatggtgacacccagcactgccggaaggctctgcaccgggccgtccagtgcaccagtgactacccagagcacgtctgcgaagtgttactcaccatggagaggacagaaggtgggacccccagctctcttctggcttggagcctaacccatttgctgtttggtctcaagtaggagcatctggttacagtctggggacagactgtgtttatgctgccaccttaggtggtgccctatgattagactgtcacaagtgtcctgaaaatgagtcctcctgcagctcttctcaaattctgcagctacaaggaggactctgtgatgtcactgtagcacagggttctaattctctgtgggggggactgtgcgttatacaatgtttaggggcatccctggcttctagccctgaaatgccagtagcagcttcaccaccacaaccaaacatgacaaccagaaatgtctcttaacattgccaaatgtctcttgatgggcaggatccctcctttgagagtcactgtgctctagtacaacatctatccaacaaaggagcttggagaggcaaatggctcaatgtgtcctttgcatcccttgttaaatttcagagccttcagtgttagctagaaccaatagaaaaataatgtgaacttatctgtgggtattggtctggattttgggtatggacccctcagaactggcttgcaaagaccaccaaaaaataagaaataaatgcctcaacatttgagtagctcttaaaattcttcagtcttaatataaatgtacttttgcattagaacgttcgttttcatattcttgccatttagagcccttaatagatcatattctggttttcaagtctctcctgaaaggagagggacattttaaacccacttagaaggactatttgaattctgaacttcaagcctacagggattacattttcttattgtttgatgggagagatctcttctggaggtacagagaaattaagaaaaatttatgtgattgtatccttcaaaatcctaaagagtgaaagttttgcttctctttctttcaaggttctttagaagattgggatatagctgttcagaaaactgaaacccgattagctcgtgtcaatgagcagagaatgaaggtaatgacaatgtttgaagtctttggcacctctggtagctattttggctcagtttggtatggatgtttcttgtcaagatgttttacattttcctaagtgtcttttactcagtattaattataaaatatttagatcaatgcttaaacctgtcttgtgtcatttttacattgttctaaaacatcagccccaatattaagtacttgtttcatttagtgagggaattttggctctaaaatttacgagaattgatgaaaaagaataaagaagagcctcacttagcctagtgagtggaacatgaacaccccaacttatttagggcttcagttttatggatttttttttttttgagacggagtctcgctctgttgcccaggctggagtgcagtggcatgatctcggctcactgcaagctctgcctcccgggttcacgccattcttctgcctcagcttctcgagtagctgggactacaggtgcccgctaccacacctagctaattttttgtatttttttagtagagatggggtttcaccatgttagctaggatggtctcgatctcctgacctcgtgatccacccatctcggcctcccaaagtgctgggattacaggcgtgagccaccgcgcccggccagttttatggatttttttgccttccttttggtgagtaatgattagggtgaggaaattgctaatgtaacagagacatcagatccagaattccaacgaacctgaatgagccctggtgtggaacagccgtgagcctgtccacgtttttctcctgatctctgcttttcattagtaatgaatttccactccttctcccctttcatgacaaatcagtacagtgaatgtaattgccacatccagcgatgcatcatcttcccacttttctaggctgcagagaaggaagcagcccttgtgcagcaagaagaagaaaaggctgaacaacggaaaagagctcgggctgagaagaaagcgttaaaaaagaagaaaaagatcagaggcccagagaagcgcggagcagatgaggatgatgagaaagagtggggcgatgatgaagaaggtaaggagctcttgagaaattgtgttttgaaacgtcttaaagttagagaagttgcgaatacagtatgaagaactttcttccctgaaccgttaccagcttgatacccattaccctttgatcactgttagggtgtatgtcttgcaaacaaggggccctcttctacatgactagaatgcagccatcagagccggggttagcaatgagctatgggttcccatttatcctgataatgtcctttgtagtgaaaggatccggttcaggatgcactattgtgtttagttgtcctgtctcctggatctccttgagtctggagcactcctcagctttttttttttactctgatgacctgcagtcttgtaagggggcaggccagttgctgtgttgtgcccctcagcctgggtgtgtctgatgctccctaagcattggattccactcatgcatctcgggcaggaatagtgcacaagtgctcctgtggcctgcccattgagtcccatcaggtggactgtgattcgctttgttccatcactggtgatgacccttttgagaattatttatgctgattctctacttatcccaggtttggctagcaagagttccttcacacaggcttctatgtccctttgacctgtccccttgttctttgatcatttccttaccttctagcacacaatacccaagggtcatcttatactttccataactcagccctggaatccatcatttctccaaggttcctttgagtgatgagtggtatttagaaggtgctagttgtgctcactgctgttggttattgttctgaggcctgagtggtcgagggtagggagtgtgtgtgtgtgtgcgtgtgcgtgtgcatgtgtacacatatttatgaccatatttacttgtgtaactatttgtatatactgaaagtcatgatttcacaccaatacctccagttccggtctaacaccacagggttccccttcacacttgcaatgcccttctctctctttttaaaatttatttattcatttatttttgagacagagtctcgctttgttgcccaggctggagtgcagtggggtgatcttggctcacttcaacctccgcttcccgggttcaagtgattcttgtgcctcagcctctcaagtagctgggattacaggcatgcaccatcatacctggctaattttttgtatttttagtagagatcaggtttcgccatgttggccaggctggtcttgaacttgtggcctcaagtgatctgtctgcctcggcctcccaaagtgctgggattacaggtgtgagccactgtgcccagctgtgtcacgcccttctctgaccttgagaaacttggctccctctattctcagcatcctcagttactccacccggcccctgtaggtatgtaatcaacttcctgtgcctgcctccccttctcatatgtgccatccccaccctgtttggtctcccacacccggggccaggcacggccctgcatggacacccttgcttctttcactcaggcttccagatctaggctgctgggtccctgtcactgccccatgcctgcctgtcttcttccttccattcaggctctagcatcccgcaccactgctgcagccccaaccctgcacagacctgccaggcttggccctacttttttttttttttttttttgagagggagtctcgctctgtcgcccaggctggagtgcagttgcgtgatctcggctcactgcaacctccgcctcctgggttcaagtgattctcttccttcagccttccaagtagctgggattacactttgccagccaccatgcccagctaatttttgtattttagtagagacggggtttcaccatgttagccaggctggtcttgaactcctgacctcaagtgatcctcccgccttggcctcccaaagtgctgttattacaggcatgagacactgcacctggccttggccctgcttttaatggttctgacttagtggaattttccagcagtgtttctttcacccttgtaatttcagggacgggcagctctgggtcatatttatttcagagagtcagtcaaggtaaagaattgtctctggtggctgggcgcggtagctcatgcctgtaatcccagcactctgggaggctgaggtgggcggatcacctgaggtcaggggtcaagatcaacctggccaacatggtgaaaacctgcctctactaaaaatacaaaaattagttggctgtggtggcgggtgcctgttttcccagctactcgggaggctgagacaggagaattacttgagcccgggaggcagaggttgcaatgagtagagatcatgccgttgcactccagcctgggagagagagcaagacactgtctcaaaaacaaaacaaaacaaaaaaaagaattgtctctggacttgaaaggactctgtatactttcttaatacagatgtgtgagccagagagaactgggaatggagtcatccatcgttgagttgaccttgcttgcacaccttgtttgggctttcctaaatgactgaggatggctcattgctccactggcctcccagtttggcagaataaggcaaatgtgatgtgtgaccgcagtggtgtgtgatcagggcatggcgtgtgatcaggactgtgggagatggcattgttaatactggtggaggccaaagaaggcactagtgggtcaacttcgtaccaggaagactgtgggggaagagatgcggcatccagggggaagaccgagtgactgtggcagcgagaagggaaggtctgagctacacagggaggagccaatgttagtacagcctgaaggcacagcacagcctggcattttctgtgagcagcagataattgggtttgaactcagatgcattagagaggggtggggcagtggtcgaggaggctggagtggtaggtgggccagtcagctggacccagcccagggacactcttgaatacagtagcagtgtgcagggcttacgttgcattggaaaggcagcgggtgaactgatggggaggtctgtttgccggaggctgatgtctgttgagcttcagtactggccctctggaggcagtggtgaggacagactgcagtagaagattgtggttaagctctcttaaggacacaaggccatattgaaagtgttttagaaaccacagatcctttgtagtgctttccaaaatgtgctccctggggcacgggtatcagtcactagggtgcttttccagtgcagattctcatgtcctatcccaaccctgctgatctgggctttgtaggagaggggccctggaatttgccttctgaactttgagatccactgaccttttgtataattaagagtggacaatggggatttatgttattacttccacttgattgagcccacttacccgagtgtaattggggcacagaaagtcgtgggacaggtcaggcggatcacaaaagacttctcggggtggtgcttgcccctccgagtctggtgagggagtaagtgtcacatgcagctgtcacagcactttcacttcacacctctgttcaagctccctgaagagaagtaacagttaaccatggctacttttcttttgaaaacctgtagagcagccttccaaacgcagaagggtcgagaacagcatccctgcagctggagaaacacaaaatgtagaagtagcagcagggcccgctgggaaatgtgctgccgtagatgtggagcccccttcgaagcagaaggagaaggcagcctccctgaagagggacatgcccaaggtgctgcacgacagcagcaaggacagcatcaccgtctttgtcagcaacctgccctacagcatgcaggagccggacacgaagctcaggccactcttcgaggcctgtggggaggtggtccagatccgacccatcttcagcaaccgtggggatttccgaggttactgctacgtggagtttaaagaagagaaatcagcccttcaggcactggagatggaccggaaaagtgtagaagggaggccaatgtttgtttccccctgtgtggataagagcaaaaaccccgattttaaggtaggtttatggaaaaaaagaatgcctttcatctgtggttgctttagacaggcactttcttcctgcagcagtgatatttaggatagacatggaagttttacgctctgtttggatctaaacttccttgtgagccaaggtccatcctgagccggttgactgaggtctgactcatggcatggctccttcttgctgggtgcttagcaatgacaagggactgtgctgaatgctttatgtgtgtcagctcattgactcctcatgagactctgtgaatggttacttttattcttgccgttttacagaggaagacatggaggcctggagaggttaagtgactcgctccggtggccccattaacaagtttcagagcatggcttggctctagtctgcctggctgggctgctcatggggacaaggctggtgtcagaggagtcaggtgagctgggtcatgcctcgaatcatggtttttctctgtcttccttcttcctataggtgttcaggtacagcacttccctagagaaacacaagctgttcatctcaggcctgcctttctcctgtactaaagaggaactagaagaaatctgtaaggctcatggcaccgtgaaggacctcaggctggtcaccaaccgggctggcaaaccaaaggtcagagtcagagcagattgtgccttgtcttcaaggcttgggcaaacttcgtttctgtatcggttcaaagatgatttaacctctagaatgggttcctagtttgtctgctgagaaacaaaagttaatttcacagaaagatctgcacttagctctacttatatttggagtcagattaacctgtttgtagttaattgtactaaaaagaataagacacttggaaatagaggatcatgaattcaccacactatggcccctggctgtggggcttgggggaagccctgtgaccagcagcatacgggctttggggtgggcgccctcctgcagccttctccctctgtcccaggcctctctttctctggggcctccaaccaggccccttgagtccctccattgcagtgcctcttctcctgtctttccttcttgccccctcagtctcctgctaagtccttttgtgccccattttgagtagtaagtggtttcattactgtctacccactgcccactctccctcccctttatccaggttaatggagagaaaaagaggatgaaatgagggagcgggtgaaggcacagaaacacgagggctcacctgggcacctgggctgctggccctgtgtcccatccacctcttggtttatttgctggatttatactggtccatctgtctttttccttctttctttctacttctgcagcacgtacaaggtgtgctgaacttggaagggttatctgaagttacagtgcatagcagcactcgggaaggagagtagggtggggaaataagcctgtagacagaggatgcggtggtggggaaggtaacctgttggtgggtcgtttgctgtggcctggtctgctggtctccgggaggaagcccagtgcctgccctgcaggaggaggttgcgtccctagtctgcgggatctgacttggttctggatcttgcctcttccagggcctggcctacgtggagtatgaaaatgaatcccaggcgtcgcaggctgtgatgaagatggacggcatgactatcaaagagaacatcatcaaagtggcaatcagcaaccctcctcagaggaaagttccagagaagccggagaccaggaaggcaccaggtggccccatgcttttgccgcagacatacggagcgtaagtgcttgcatggtagactagtgcaaacttcgtcctggctggcaccagttcatggatcacggggggattaacccgggatgaattagcttcctgttaggacagaaaagccaagatgtgctgttccttgtggtaatcactgtggttccactggagcaaggcgtccagagcaggatgcaagcctaggcagtgacctctgcctggtactggccaatttacacttgtcatttatttcagacagaaataaggcagtgattattttaaagtcccctttgccagttggatctgtgtgtttacaaagaaatctcatacccatgtgtgtgccagtctacggccctagctatgatccacataagctgtgctgttcgctggtttgggatgaggaggagatagcagaattgccaggtgactggtgaggtctgagaggtgatagtcacactgatcccctctgagtgtgactggtgctcagggttgatctttgccaaaactgaacaaggccaagtctgttgaagcagtttttacttcataaacagaattaaggaggcagggattatcttatcctttttttttttcaccttttaacttctggttatattaaaactgtcttggcttattttcacaaataaatgaggggccacgaattgttgcttcaaaaggtccattcagtgtttgctcttttaggagggggaagggaaggacgcagctgtctctactgcctcgtgccctgcagcgcccaagtgctgcagctcctcaggctgagaacggccctgccgcggctcctgcagttgccgccccagcagccaccgaggcacccaagatgtccaatgccgattttgccaagctgtttctgagaaagtgaacgggacgctgggagacaggaaatgccttacttcactctggcccggcggacctcccaccacccagcagtgcactggggatggacaggcctggtgtgctgcgtgctcgcaaccacagatggctcctcggctttagacagaaaggggaaggggttctaagtcaagagcctttcagtgctccctcatattgagggcagtggcagaaaagtgaccactctgcaggctgggcccaggatgtggtgtcctgagatagttttgtatcttaaagactgaggcacagaagcgaaacgagaacacactgtttttgagacacagttgtccaaatgtttctggccagctccggcccctttttgtatgacacttctcttccaccctgcacagcacatgtgcccgtcattcttttaattttaaaagatgaaatggcagatgctagtaattcacagaatggcctcttgtgggggtgggtctgagggaagtcagctataaaacatttgctggagttttgttcaatggggctgtgcatttttatattatgtgtttgtaaatgacatgtcagccattgtttcatgtttcctaaaagcagaatatttgcaacatttgttttgtataggaattatttgtgccacctgctgtggactgttttctttgcctagtgactagtgacctgtgttgtctaaacatgagtttcagccctttggttttgtttaataccatgtcaaatgcaaacttcaattctccccatttagctttattaaactgacgttctcttcaaaacttcttgctgaatggtactcagatgtgcattcacatacagatgtgttttgaagtgggtgtaccttgctttacctaatagatgtgtaaatagaacttttgtaagtcaaatcccattgtcactttgatttaaattattccagctgtgatgtgtcttcattttatagcagtttgacactggagcttttgagcttttttacctcacatcttttatcaaataatatttactgctttgaaaacagcaacagcattggccagttcagtaggggaagcttgctttattaagacactctggagaaagacgtcagggaatccttgtatatgtcgtgggaatcaactcctcatttatctgttgcgtaagtttaagtttttgtgcatcagtcgggttttctatatttttttaacttaacattttttaatataaccgattaaaaagtagacagaacagtaaaataaactcctgtgtgcctaccattcagcttccagcattcctcaactcccagcccctcttccttcatgtctgtttcccctccaccctctgttatattgaggcacgttccagatgtcattgtgctcatccagtaatgttgcggcaggtgtctcaggaggactgaaaggccttcactcctagaaacattagtggtaatcccttcatgtcatcaactgtccactcaaatttccaccttcctacaaatatcagctctcctccctgtaaattattggttggtaagcctcttaagtcttaaaaggtaggttcccctccatctcttttttatacaaaaccaactttttactaggctttacttctgaattaaattcaagcggcggctattgacagcagcaagaacctttgctgtcccacgcgttcctcctgcagtgttctctgtgatgctgcttggaaggctgatggactgttcagctggtgtgatgatttgggtagctcagagccctcatggttggggacctgacacatgaagagccctgaatatcactatgggtgagtgtggccttactttttgctgcttcacattaacggtttggctttgcctgcagccagtattctgaccttaatgtcacacttgcagatgtcagcccaggcttggtacaggggcaaaccttttcaggcttgagcagaacccagttaggttccgggtgttgactgttctagaaatggatttccaggactacatgagtgggtttgtgtgttttccccagaaaatccagaactgatgataaatagaaatgtgaaaaactacttcagttacttgactgtttgttagtaaaaaaaaatcagtaattcatccttgcccacctaggtaggcggtttatccaacttctgggtctcttgcccatggaaatcaccatcttggatctgttgctctcccagaacagtattatgaatagggctaaaggtcagaatacccccactgcccttatgacagatgggaacatctcccaaataagacagtctcaagcattcatgtaataaaataactttattagaatcaggaatttgttaaaataatatccttcacatatagctaaagtgcaaattctcttgctctgtagtagaagcaagcacatctgtcagacctccgtggtgtgcttataaaaccaagacgagaagagttttaagaagtacctctggcagcataagagtacgaaaacacattttataaaggtttgaacaattatcatttggagccatttcatatatcgtgtatgtcttttcacttatttttcttaacctttcaaaaactactctgtgctatttatacaactgaagaactgtataaactactttagagcagtggcctcattactgtcaggaacggaattaccaaatcaaagagacaacactgcgtattcgccatcactcacacactgacaaagtgcagtagtgttagacatcatgggctctgtcactgggaaagggacccagtgacttccacctctctgactctaaatagcagcagtcatattggcacctgtaccatatgattcaaagagaagattctacttccattggatgacagcttggaaacccggccatattacatagagcactacatcatttcacaagttgcgagaaaaataaggccactccgaggcaatctcttctgcctcccagggggatgggacacgggacagtgcaaagaccgtggaagatggcagtaagtagatgaaactccaggaccaaagggatgcagcctggccatggctgaaggtttttgctccattcagtagaaactggtgctctaattcattatcaaaaatgcttacttggtgtccacatggcacttgttttctcaggttaacatctgcctacagaaaactcaggcagaggggtgagggcagatgcctactagcataacacctggtttgcagcacgatacaggtggaatgacaagcccagagaatttcagacgaaaacatctggcctgagttgctacaaatgaagtgtgagagaaacgcggatacacaaagaaaaccaaactgcccgcccaccatgtttccccctccaacatacagctctttatggctaccccctattcttaattagaaaaatagtctcaatatgaaaaaaaaaaaaaaaaaaacagctgctggcactaaagtttgcaaactatggctcaaaaagtcttcctgcaggtaagtaaggaatgtcggcattcattttctcttctatgaagtttgcttggaagttagtcaccactaatctaaaccttgagaaagtgagctttcaaccatttctctcagctgcgacttgggtctgacttcccagttgcagtcacagaacctctcagcctgtttcagagaagcacttggaggagttatgtcagtggctctgggccccgtcccacacctcttggccgctcctccaccttagtgcaaattctgctccagaacctttgttctggtcacatggtggcactgttgcccctaaagcacggccaccagcaagacacagcagacaccatacaatactgactagcttgctccaaagaagaaaataaatagcttggttgaattataagttattttagagacaaggcttcataacttagtttttttttttttttaaaactaaaacatttggaggtaaagaatgtttctccttttgctttaggaagtgactaggtttctagaaatgctgtttctttttttttttcctacctcaggacagcctttgtcactgaggatttctagggttagggcttcacaggaagcgtctccttgaacccagagtggttgggttgggcttctggcagtgccaccgagtactcagttgtggcaaaaagcagggtgtccagggtggtctcagtacacttggcgatgaagcgaatgaaaggcctcacgtcgccctcgttggcagcttccaacacgtggtagtagtcggaccgctgctccttgcggatggtgatgggcgggtagcccgcctgcatgaggatgaggttcatgagcagacgggaggtcctcccgttgccatcaatgaaagggtggatgtaaacgagtttataatgggctaaggctgcaaactccactgggtgcaggttcatggcttcctcggagttgagccactgtacaaactcctgcatctgcttttccacatcctgcggatggggagggatgtggtgtccgaccaggacctgtgttgtccgaaacctgccggcttccacggggtccacgtagcccagcacccgcctgtggatctccagcacgtcgctgatggtgacggagccgatgcgcgaaaccagagtcgtgttgatgtacttcatggctgcatgcatgcctatgacctcgttctgctcctccaggctcttcccgggcacggcgtagcgggtctccaggatgtgcctgatttccgagagggtgagggtgttgccctcgatggccactgtgtggtagatgtgatggtagtaggtctcctccatgaccctgcgcagagctgagttccccttggggatggacatgaccttcttcactttgctgtcgatgatgctgaaatacctctggtcgatctcttccacaagaggcagtgtccgatcgcggttgaccagtgctttctcatggtagggtgagatggtcaatgctctggtgtacaagtagtccgcctggatgatgtccttgtcttcttccgagaagatgccaaactcggtgagcgcgtccacgaagtccgggtccatcttgagggcgtgcatgaagagcttttgggctttttcccgcttgccctggcgcttcatctccagggcctggttcagggcagctctggcttccaacttacccgctggaagagagccaaagaagcgctgtgagggagggaggctagggggcagaggacattcggggggctgtcccctgtgctggtctccgcaggaaaccatgatgaccagcctgtgtccctggccttgaggagcttgttgcagccgcatcgtgtgtactcaacatgcccggtaccactctgttgccccagccgtgtggtggtatgcagtcactatccgtgtgtccccagagccactctcttgtattctgggaggcacctccttggcttcctagcctcctgctttctggacatagaaagttctaggcatttacttcgcctgggccctctctgctgggcctttcctgtgggccacagctcccagtgtaggccgtctcctacatctccagctcatcttgtgctggtgacacaggttcctgccccgggaggcccaaaggcgttaacaactccccactcttcctagaccctgggggcgtcaaccatcccgggactgttctttaactcttttaacccagtggtttgattgtgcgccccaggggacatttggtgacgtctggagacctggttagttgtcataactgaggaggtggagggagtgctacaggcatctcatggggagaggccagggatgccaccaccatctaacaatgcactttcagtccccaccacagagaactggtggaggtggggagcctgctctagccctagccctcctgtcctggcccctcttggccacctgaggatcagccccacacattcaacttcctttagttcctcgaatgcccccaggctctcttacgacagttatgtcagttatgacaactaacctctggtctctgcctggagtccttttccttggatgcccttcaccctggatgactcctacttaacaactgggtcccagctcaggtgtcacttcctccagggagccttcctggtatgctcctacagccctttatgcttccccatcaccacacttgtgacactgtctcagtcacatcaccttgtctatactaggagctcagggctgacttgttcacaataccccgatgccccacatacaggacatgacacattctatgtctgtctatccagttaacaagcattgaggaagacggccagtctgtcttacctggagaggccttggtcttggccaccagcagcgtcgcgcccctggaggtgatgctgagctccgtggacgggctggtgcacttggtggcggcatgctgcgccctgtccggtttgctcctgagcaggtagaggcctttgagcacagccaagcactgctcctccacagcccccagcggcagcagcagggccagcagggaccccagcaccatgctcagcagcgtcacccagaggaagcggctccagaccgagacccatttcggttcagtcaccgccatcactgaagccattggtatgagcatcatctggactcaggagagggccctttgcgcatgtccacaggcggctgagagagagcaggatctgcaaggagccaagagtcgcaggagaaacagacacgttcaggacatagtgtgacttcagctgggaagatgggtttggagacttctgctcttttagctcactagagagatggggtgggggcaagtcaaggactggatctcactagaggaggggccagcctagaaggactggtgccacctcctgggcagtatgaatgtgaaaacactgctgtggtccaacaattaatgagcacttgccataatccaggccgtgtgctaagcaccaaatgcctcacatgggtcacctcctgcaatcttcaacgacttgagctgatgttttcacccttctccaggtgagggaactgaggttcagagaggtgaagtcccttgccgaaagtctcgccgggagcaagtgacagccttaggacttgaactcaggaaccccacggctctaaagtgtccccccttcccatatatccctgtggcttctgaccacaaacactggatttgtggacatatgtcaaacatttgggacataaatgactgacagacacccaggcagatcagccacagcagttctgacgcccaatctttgataagcacaattgttgggtggcctcatttattgccctcaccctgatattcagccacagctcccacagtgcccttcccctctctggccttccatttctggcctgtccagaagggaccccatcaagaagatgagcagttcgagcatctcgaaaggaactcaggctgtgggccacagtgcttggcctcagtgacaacatggcttgtatgtgcttggggctggcagtgggagtggaggtggggccaggcatgcaaacactatgctaacaataagcacttattaagcaactatggtgtcctaggtgctgagcagtgtactggccacgcattgcctcgtttcaccctcatgccaccctatgaaggaagagctaccgctagctccattttacagacaagggaaaccaagacacagagagcataagttaaattccagaaggcccacaggaggtaaacagaggcatccggaaggaaaccccagggcctctgaacccggtccccaggtctcgatttctaccttattactaagcagggcctgtgcacctgctctgggctggtcctgacccgggaatgactgatggatcacggggttctgagtctcatggggatcctggcccattgccacagaacatgtgaaatggcttggggtgcgctttaataggggtgcgcctggagtgctgcgcgggtccaggggtctgggcgggcttcccgaggggacaggctcctgggcggggcggtacaggaaagggggcagttcgccggtgccaggggtgtgtgcagggaaggagtgcgttctgggaggcgcgaatctctcccccacacttccctagaaagggagaactgaggcccggagaggggaggggaccggtctgagtcccctccaagactgcagagcctcccttcccgaaccccgcccagggctcgcggccccgtcgcacccttcccggcttcatcctctcgagcccctagggcttttccccttctcaccgcgcgcagctgtcagaaccccaaccgccttccccgcgctcccagctccgggccgccggctcccgggtcctcc

SEQ ID NO: 12859 - DNA, 254 bp, Homo sapiens
caatgtttgttccattacatatgatttagaaagctcatgaggagaggaggataatctgtcgtagttcccgtatttctgctcttcctgttctttcttcctttttgatgctttaggattccttcttctaacttttctgttcgaagaacttcctttagctattcttcaagggtaggtctgctagtgacatttttttcatttttctttgtctcagatatatggtaacttaaaataattttagtttgaaaagtttcaaa

SEQ ID NO: 12860 - DNA, 4319 bp, Homo sapiens
caagtccctgcaaagaagcaccactctagactggcaagggcctccacagtgtggaggtcccattttattatttttttttttcgagacactctgtcacccaggctggagtgcaatggtgcaatctcggctcactgcgacctctgcctcccaggttcaagcagttctcctgcctcagcctcctgagtagctggcattataggtgcccaccaccatgcctggctgatttttgtatttttagtagagacggggtttcgccatgttggtcaggctggtctcaaactcctgacctcaggtgattcgcctgcctcggcctttcaaagtgctgggattacagacatgagccactgtgcccggcccccattttattttagttttattttgagacagagtctcgctctgtcacctaggctggagtgcagtggcgcaatctcacctcactgcaagctctgcctcccgggctcaccccattctcctgcctcagcctcctgagtagctgggactacaggcgcccgccatcacgcctggctaattttttttttttttgtattttaagtagagacggggtttcacctgttagccaggatggtctcaatctcctgacctcgtgatctgcccgcctcggcctcccaaagtgctgggattacaggcgtgagccaccgcgcccagccccattttattttttactttaaatgcctgccaaggagcagcctcaagcccagagaagactgaggctacggggaacttcccttgctgcaggctgttgtaacactttaagggccccaggtctccactgccaagcaggacttggcacatgagcacccaccccacagcaccatcaggcagcacccatgggctccaccagcccagctctgtccctcccctaggtaaagatcacactgaagtcttcaagtccccagcaaccaagttgggggtggtttccttcctcttcaggcagccaggcccatggctggaaggccgggctggaggccagggaatcggttactgatgtggccaccctattcccacatggggagcaccaggagccctggagccccttccacccaatcccatctcgcaggagagcagggtctgggctcctgcctcaccgctggttcagcagcaccctccccgccgggtcccaccttgccttttgaagaagagcccgcataatgagtggacggcagacagctatatttagtggtgcctcgacactcacgaaccgccagcgtggcgcctggatcttgcccagctgccagctccccccaccaggactgtggttcctcagtttctcctgccagccccggctcatctcagggcaaagctatagacatggtagatctcatcggggaggttctcctgcctctcctcggccaggaggctgaggcctgcactgcagatgatcctgcggaccacgtcaaggtcccggcacacgctgctgtccacgtcgtccagaatcacgccctcctgggccatgttgtctttgatgacgatgatgccgttggggcggaggctgcccttgcagcgccgcaggaactcggccaggtgctgatcggtgaggtggcctggggagggcagaggcaaggttaccagggcaccatgcaagcggatgtcggcactggatgggatgtacttctcagccccgctgagcccctcatttgtgcccagcattttgtgtgcacacatggcctcattggctctcagtcccgagagatttactaaaccccaattcatagaataggaaactgtggctcagaggtcatctacctaaagacacattaagccagaatttgacttgacgggatggcttacaagtcctgcctgatacctacacaccatgatgccccacccctgccaggcttggatcggaggagtgaacctgggctaagagtttggcattgcaggagctcccagagagactgccttccctacactagaagtccccacaaaggcttctgagaccacaaaatacaaggccagacctagagtgtccacagcaggcctgtgctgcccgcctcaggaggtggccgactgctgctagcggcctgccgccacgtcagcagcccagggcacagcgctcgaggtgtgctgttaggctaagagggtgcagggctagacacgaagcttaaactattcatcttattaaaaataaaacccttataaaactcctcactttgaatgcagtaagttattggccattaaaattttttcaacaaaaaactgcacccaaatggatggtagcaggtattcaactgaaacaaaacctagaaggaagaaatctaccttttaggccgagcctgtccctcagtcctgggaagtacggggtgggggtgggcctgggcggggtggggaatcctcactggcccacttgctgcaggagtgcaaagccctggtcctgacaccttatggggaacgcgagtggcaggagacatacaggtgagcagggaagggcggtggaaccctcacctatcacccactggatccagatcacgtcgtaagagtccggctccggggtgaagtcctggagcccacaacagaagtagttcctcaccctcttgccctcctcccccaggtaggtcttggcttgaaccaggaagtcctccgttatgtcgaccatatccacctctctgaacagcggcaggagcagccgcttggtgatcctcccaatgccagctccacagtccagggcacaggacgttcctgtcttgttcgggccttcctgaaaagcagaggcatataacctatcagagggaccctgtcaccgcacgtgcggcccttcctcacgagccctaggacttagactcaagtcaggattccaggactccgcacaagctgagcactggtggggaggtctgtgctggctgccagcttgtacggagtcgaggggatgagcatgggaggacacactgctgggccacacattcctttatctttgaaagttcaggttgcattctgcattctgttcaggttggaatgcagtggtgggatcatggctcactgtagcctcgaactcctgggctcaagccatcctccatcttcccacctcagcctcccaagtagctgggactacaggcatgcgccaccatgcccaactcatttttttttttttgtattttttgtagagacggggcctcggtctgttgcccaggctggtctcaaactcctgggctcaagcaatcctctcaccttggcatcccaaggggctgggatgacaggagtgagccactgcccctgccctgggccacacatttctaaatgaaagctaatttccacttaaaggtgataacttgaacaggtgcactaatctctcctgagtctccaggtaaacaacggcagagaggaatggggagaatggaagcggggcaacaggtgaacaagggtgcagagagggaacatggagggaggggaggcgctggatggagcaggtggccaacagcagcctccagtgccagccatgagacaagaaggtggggggctccaggactgggggtcccagcctggtacagaaaaggctgggggtggagcagagggtggaaaccatggcacataactaggagtcttcgtccagaatagccaacaccctcagtccaaacacccgtggacatggcaggagagcaagggtttcgtccctggcaaaacccaacagttgaagagaggtttgcccaattcaggcacctcaattctgcctaacagccagctcctgtctggtaaccctgaggctaagtccacaatctagaagttaccccactgtgcccacccagcccagctcctcaaggctttggggtaggtaccaagagatagccaacaatcctgcagtgttacatgtgtaaaaggtggcaccccacatggactcggcagtgccaccagagccacagcctctcctggagagcacgccagacctgcctaccctcaaaaacctctgcagaaacttccgggagctgttgatgtcgatgctggagatgtggccataccccccaagcatgccgtccaccgtgggtgggatttgtttccagtaggtcttggccttggaatagaattgcttctcgtcttctatcacctcgctcgtcatgctgtcaccaaccacggctctactcaagcaccacgatcagcaaccgcgactctcctgggtaaggaagggggcgtgagtcagcgggccagggacctggcagaaaggcccccagggcagagggccagtctcacaccaggcttcacaagtcacacatcctgctgagtgcagagagaagtccagggtccccaaatctgcttctaccccttggataacagcatcttctgtcttttgcactcagagcacccgccccaag

SEQ ID NO: 12861 - DNA, 5227 bp, Homo sapiens
ggggctggactggcggacaggtggggtccgcggccgccggagcgttccggtcggcgtctgggcatctcggcctcggcagaaagcgcgacggccctgctgcgcggggcgcgcggcgatagccgttcctgcacggcttccggagattcatcttcgagtaccagccgctggtggatgcgattctgggctccctggggatccaggaccccgagcggcaggagtctctggaccggtaactcaccccctcccgtgagctggccgaggccgctccgaccccgcagcgtcccagtttatcaccacaagccgggcggggtggatgcgtcccccttgacagaggaagggacgggcggaatccggggttgcgtggctcggagtgcgcgctgccccgcgcggatcccactcctgccccttgcatggcggagacgaagggcggggagggccgagggggaggcgcccgctggttgtcgcagggcctgcgcctcagccccaccctgtcgcctgcctgtcctgtgccaccccccggcgtggcagaggagcagggtggaatccgtgagcctcagatgttaccccagagcagtgtgaaggtgggcttttgtagcagagtttgcgtttttatagacaagagctggtctgtcgtggacctgcaggaaaggggtcgggagcgaatctgcattcactgcccatggtactaggcacctggggtccatcagtggctcagcaaaacccccgccttcttggcgcatgtgctccagaggagagactgacaagtaattgtacggcggcacgcgaggtggaagggaggggagagcagaaggaaggggctcggctcaggtgttgagggggttgtcagttggtatttccaacacgtggtaatgatgagtctcgccatccagggactctggtggaaacgtaggctttcttcatcaatatcagctgaaggtctcaatgtgaggggagggaggaggctgtgttgctgtcctggctgcaggtgttgccggggctggggtcctgcgggtttgaggatggaagggctttctgaggaagaagcatcaaagtcgggcttgggctcttggcctccaggctggtggtcccttcagtcccagcagcccaggtgtgtgaggctttgtacctaagtctgcgaccggactctgggcaacgcgggaggagagcgcagacagacccagcccattctccgcaaatcccagtctgctcccgtattaagagatgcagcgtggccctctctctacttcagagcttcccccaagcccctgtgacccacagagccagggccctgcttgctgatgatgatagcaggactaaagcccaccaacccacaggctgcgcggtcacccggtcccacagctgtgcctaccctcagcctctctcctgtcccaggcccagttatgtcgccagcgaggagagccgaatccttgttctcactgagctgctggagaggaaagcccactctcccttttaccaggaaggcgtgagcaacgccctgctcaagatggctgagctggggctgacgcgggcggccgacgttctcttgcggcatggggccaatctcaactttgaaggtcagcgagagccccgggggtgggcaggtggcttaaacgcggcccgacgctgggtgggcgcccatgtccccagccttggcttctaccatcctctgaggagtgacttccccccctttatttcctgggtggctgcaactaaggaaactcccattgggtggcctcccaccccctgcgggttttcacatggctcttcccacctctgttccaagagcgagtgttgctgcttctaccatgtgattgattagcaaactttccccagctcccagattaatccccacttccattaatgcaaaaatgcggctgctggcactgtgcccagagctaagggaaggtaattttctgctacttactctgagccaatttgtttttttttttctcatgccgtagggagaggggaaaacaggctgcattaggcataaatcaccacaggacaccctggctcctggctcctgagtgccagggatggagatggagccgagctcctttctctgtgtttttcagcccagggagggcagggttagtcggcagacaggcagggctgccttgtgacctaataggggcctgagacagccaggcacgtctcctttccccatccgaagacgggcttggagtctgctgggctcctggagggtcaaggagctgagacgggagggccggttctgaagccagtgacttggagaccagcttggagaacctggctgttaccaccaggcctacaaagcagagccgccagagctgctgtgtagcgcggcctcccagccattctgagagggtgcgccccgttttatggtcccttcttacagaagaggaaactaaagcccccaacagcttcagtagcgtgcccactagaacaccccgagggccctctagtatctggtgaggacagctctgtcctaacccttgatggtgacaggaggctgggcctgtgcttctggacactttaggtgggagtttggggctgggctctgggtccgggggccccataagaatgcggacagataggacccacatgagctgtgtctgcaccttcagacccagtcacctactacacggccttgcacatcgccgtcctgcggaaccagccggacatggtggagctgctggtgcatcacggggccgacgttaatcggagggaccgggtaagtgccaggtccagcttgctttgaagcagggttgggcaggggcctgagcagcttcccaagccaacctggctgtgcttccttggctcagatccacgagagtagccccttggacctggccagcgaggagcctgagcgcctgccctgcctgcagcgcctcctggaccttggagctgatgtcaatgccgctgacaagcatggtgggtgcctcctgcaggaaagcaggacagctgggcccccaggcaccttgtgggggacacccagggtgccccaggacaacagctaggtgggcagactggatgctggccctggctggtggcacagcatggctgggcacacagggattctgctgacttgctgagctcagaggcttcagagaggcagtgcagtcattgtccctgtgctggccctcaagggccttctataggaagaaatagggcatgtgtgcacttagtttccaagaaacaatggcttcccattgggagaggcccagccaacatctcaggtagcatcttggggtccagaaaaatcctacctttcctggcctttccgctcccacttctctgggtggaaagggaatggccagaagcctgtcaccctcagccctcacctgagctgagagttgtctctgaaagttcatcttctgatcctctgagtgtctggatttctgccacctcctctgggttgccctgacctgggcttcctggcctcctgctcctccttgctctccctccctccctaggaaaaactgctctgctccatgctctggccagcagcgacggggtgcagatccacaatactgagaacattcgtctcttactggaaggaggtgaggctggcgcgctcctaggcctcgtcctctcacccgccccttcgatgtgtgctgttgctttgccagggttgaaggccttctcccagcatctcttgttctatggctcttctaggggcagacgtcaaggccaccaccaaagatggggacacagtgttcacctgcatcatcttcctgcttggtgagaccgtgggaggggacaaagaggaggcccagatgatcaaccgcttctgcttccaagtcacacggctgctgctggcacacggggccgaccccagcgagtgcccagcccacgagtccctcacccacatctgcctgaagagctttaaactgcacttccctctcctgcgcttcctcctggagtccggagccgcctacaactgctccctgcacggtgcgtcctgctggtctggctttcacatcatctttgagaggctctgttcccacccaggctgcacggaagacgagagccatgcggacctcctgcgcaaagctgagactgtcctggatctcatggtgaccaactctcagaaactccagctgcccgaaaacttcgatatccaccctgtgggcagcctggcggaaaagatccaggccctccacttctccttgaggcagctggagagctatcccccgcccctcaagcacctgtgccgtgtggccatccggctctaccttcagccgtggcctgtggatgtgaaggtcaaagccctgcctctgcccgacaggctgaagtggtacctccttagcgagcacagtggctccgtggaagatgacatctgataggtctcaggctacaggaacgggggacacgggcagctcaggtcagcctgttggtagatgctgggacagcattagaagagggtctttttgatctgggagatgagacgggatccttcatgagaaaagccagccaggtagagcctgaagctgtgatcactccagtggtgaagggtgcagctctggttcttccagagagactgcccccttccctccagcggcactccaagtcccccccatgttggaaagaggaacagggcttggattgatgtttataccctctgaattggaggggcagtgccagggcatttgcagaagctgggaaggaccaagcctcagcaccccagggctgcggggctcttgttggccgcacgtggcagtgcagctggagaggaagcctggggcacgtcctgtgcggtgccaccaaggccccacccctgccccttttccttccaggttctgttactcacagaagtgtttctggtgggctctgcgggagaagacactaagggccccacaggcttgtttcatggtgttgcaagccaagctggcccctgcctgttcctgtagctctggggccaggtcagccgtggccccacctaccagaactgtgctctgctggcagctgtgcttttgccaaacccagggcctcagcgaccatgacttctgctaaaaagcaatcatgagtgcgtggctggggacagacctctctgaagtgtctcctgttgtgaggggctcactttggagccactgaagagccgactgtgccacccacttgcgagcctcagtcccttccaagctgcactggtcattgggaattgtgtaaacacctctggggataagctgaggtgactaaatgatatatttatattataagattaaactgactttcttggccttaacaa

SEQ ID NO: 12862 - DNA, 1067 bp, Homo sapiens
agaaaaactcaactcgtctcacaactcagaggtacaatgaaaaggagttttttcctctgtgattggaactttctcttgagccctttcccttaggggatactaggagacaattacatctctaattcaacctaagtttattcccttttagtggggttcaatttctgttagccaaaagtgctcagtccctcaaacagcttatcttttgttgtttctctaagattgtgtagaatttggaaagggtatagcttatttgaccttatggctttgtgcggaagccggggtccccagtagatctcctggcttctggataatgtttctttgctgctgggttgctaggtgcctcattggcctccactgccaacttctgggtggttattacttagggttgtgactattgcttgggcaatgcacctgcaggtgctttctgggcaattccatttcatccggctcttgatggcaacatcagcaccttggggacactctgcgatatgtgttttgcttctgttttttgtcccggattttctgcagggtcccctgtctcaataaggaaaactccttctatcagtttatccagggtaggcaggcaggtacttctaggtccgacgcagtgtgcctcagtggaccaggatcatggacacaggacatgggtaagttcctgaactcctctctgcctaaggttcttcatctatcaaatgaaagtagtaatagtgagtattcactgaacacttcctatttggctgcactttttaatgtgtttcatattatgatgtgccaggcagagctctgtaataagtcagtgcttctcaaactctctgtggtaaatgattaccttttttcttgaatttccaatttgccacagatcaatatttctgcaaagtactttaaaagttacttcctatgagcttttacagtgacaaatgaaaattttaaaaaaaaccttaaaattgaaatcactgtacaaattagttattggttataaattactacaaacacttcaataaatatttaacaaataaaaaaataaaaaacttaattcctagaaaatgacataaaaaaaagaaaaacaa

SEQ ID NO: 12863 - DNA, 1067 bp, Homo sapiens; identical to SEQ ID NO: 12862

SEQ ID NO: 12864 - DNA, 1065 bp, Homo sapiens
agaaaaactcaactcgtctcacaactcagaggtacaatgaaaaggagttttttcctctgtgattggaactttctcttgagccctttcccttaggggatactaggagacaattacatctctaattcaacctaagtttattcccttttagtggggttcaatttctgttagccaaaagtgctcagtccctcaaacagcttatcttttgttgtttctctaagattgtgtagaatttggaaagggtatagcttatttgaccttatggctttgtgcggaagccggggtccccagtagatctcctggcttctggataatgtttctttgctgctgggttgctaggtgcctcattggcctccactgccaacttctgggtggttattacttagggttgtgactattgcttgggcaatgcacctgcaggtgctttctgggcaattccatttcatccggctcttgatggcaacatcagcaccttggggacactctgcgatatgtgttttgcttctgttttttgtcccggattttctgcagggtcccctgtctcaataaggaaaactccttctatcagtttatccagggtaggcaggcaggtacttctaggtccgacgcagtgtgcctcagtggaccaggatcatggacacaggacatgggtaagttcctgaactcctctctgcctaaggttcttcatctatcaaatgaaagtagtaatagtgagtattcactgaacacttcctatttggctgcactttttaatgtgtttcatattatgatgtgccaggcagagctctgtaataagtcagtgcttctcaaactctgtggtaaatgattaccttttttcttgaatttccaatttgccacagatcaatatttctgcaaagtactttaaaagttacttcctatgagcttttacagtgacaaatgaaaattttaaaaaaaaccttaaaattgaaatcactgtacaaattagttattggttataaattactacaaacacttcaataaatatttaacaaataaaaaaataaaaaacttaattcctagaaaatgacataaaaaaaagaaaaacaa

SEQ ID NO: 12865 - DNA, 453 bp, Homo sapiens
ttgggtttttcgaaatgttttcatttattttataggtataaacattaaagctgttattacatttctctttcaaatatacaggtatatataacatgtaatactaaaatttgtttaacttataaaaaaggttaaaaaccttacaataaaacaaggaaacaaaaagacataacacaagatctgtcctccacagaagaaaatgctcgcatttcctctcctttctccattaatgctgcattagtgcggtgtaggcagagacgtgcttccgccaggaaaaacctcattagtctctggaagaatcactgcccgcctgtctcattgtctccccagccattgcaagcacagtccttaaggtgttatgctccctggggaatctgaatccacttacatgctcccctgtgggctgcggcacttaacttcccttgtcctcaagtttggttaatgggctgggaagcg

SEQ ID NO: 12866 - DNA, 411 bp, Homo sapiens
caacaacaacaaaacaggaggtgttattgaagcttttcctgccaaaggcagagaggtaaaagaaaaccaagatgagcgtgaagggctgtgtgtgtctgcgggggtgtgtgtgtgtgtgctctccgatttccttctagtaaaactctcctaatctaacttggctccatagtgaggcagacattactgagagcagtaagtaatgtgactatctcaattcacggtagactctcaacttacttatatgtagactttgaagaggatgaggtttgggagttgggttacaggtgtccatttaaaatactgaacctacaatttctccacctctgttccctgcagaggcatttctgcaggacatagtatcaggcctggtcctgaagttctattagaactctgctctgtcatccaggctgg

SEQ ID NO: 12867 - DNA, 118 bp, Homo sapiens
tttttttgttttgagacagagtctcactctgtcgcccaggctggagtacagtggcacaatctcagctcactgcaacctccgcctcctaggttcaagcaattctcctgcctcagcctcc

SEQ ID NO: 12868 - DNA, 453 bp, Homo sapiens; identical to SEQ ID NO: 12865

SEQ ID NO: 12869 - DNA, 453 bp, Homo sapiens; identical to SEQ ID NO: 12865

SEQ ID NO: 12870 - DNA, 411 bp, Homo sapiens; identical to SEQ ID NO: 12866

SEQ ID NO: 12871 - DNA, 3064 bp, Homo sapiens
ctcactgcaacctctgcctcccaggtttaagcgattctcctgcctcagtctcccgagtcactgggactacagatgtgcgccaccacacccggctaatttttgtgttttcagtagagacggggtttcgccatgttgtccaggttggtctcaaactcctgacctcaggtaattcactcgcctcagcctcccaaagtgctggaattaacaggcgtgagccactgcgcctggccagaaaaacttttttattctctggatagtttagtttcactactaagatgtggccttctgtcaggaattgctagtgaatatatcccaaggaaccgatgagcacaatttccaccctccaagaacttatgactgtgacaaatccataaactcttctatttggtagtggattccaggccacatgtgagttctgggaactgttcagtggacagttcccaggttactctctttgcctgacttcatggagttttatgctacacatgcaagtgttagtgttcagtgaagactcataaggaccccctgcatatttctgaaattctttttccgctttgctcccttctctctagaatttgcttcacagtttctaactatttcagtctccctgaacattgatccctctctcttcagtgcaggggaggaccactgtgctgtgcttgagctctcccctcctgcttcacaggctcccgtctggcatgtaccttctggcagaaagcaggggtgattggggggctcactttgttttccttctctcacagctcacagtcttgtatgatctcttgtccagtatccgaaaacagttgtttcatatattttacccaatttgctggttattatttataaggctgaagggtaaacttgtttctgtctctttaccatggctggaagagaagggtttccgtagactctagaagttaatcccatcatagtgatgttagtatcttcctggctctgtcttctgtgtgttgtgttggagattctgcctttcagtctgtctattcagtgagggcaagtaatgcaggccaaacaatcccagaacattcattcataagtgactagtatgagactgggtgaagtgaaagttggttttccaaatgcatcgctcataagtctctggctttaggcctgttggaggtccattcctgcagaaggcagttctgcacagacttattgattaattgattcattataatatagttagcaaaactttacagtgtttctgttgtgggccatacactgcccttgctggtgaagcagcagcaaacactgagtcttcagtgattccttggttaaggaatgctctgtgggtcagactcttggggatccgagacagagaaggcacagtttctaccctccaagaacttacaactgtgacaaatccacgaactcttctctcttctttctgcagctcagtaaacgctctgccactgacctgtgtggcaggaatgatggaaaccttaaggtgatcttccctgatgcagagatggaggatgtcaataaccctgggctcagggtcagagcccagcctggggactatgtgctggtgaaggtgaggagtccttttgggcttttggcttgcactgtgaaatgagtgttggtttggatatttgtggtaataaagttttttcctagagacacattttagtaaaataaaaatcccctctcaaccagtacaatggaagggcactttggattggattttagactgctccttactaatgccttcttattcttcttacctattctcctgccctggaagcgttctttgtgggaatttggtgagtttggagtatgcagtggcatgtagtttctcgctgcagagaggccaggaggtggagtgatttcgagtgagtagagagtgttccctgttggagatcaacattttctttgtgatctctgacggctcaggcctctttaacttacatgtgctcgagtttcttgggtctcttccctggactcacagatcagctatatggctgtgggattttctctccctttctttctctctttctttctccctttcactggcgatatgcttctcttattgtctccttccatttcttcctttcttctgccttctcttctcacactgcccagttctgctactgccaccttccctgtcttgttctcatatctgcttcgcctcagaaccagaagctggcaggacacagactgatgccctagagcatccacagaagttcctttaagggcagggaaaatgcctgttttgtttctgtttgtttatctttgtttatcttctagcacctagggcaattccgggtacaaaatatgtacttagtaaggatttactaatggactgacttgctcttatgataagacatgtgaccacagataactttggggtcacattcttttagctctcaattggaggagagagaacatttctcaccaaatgttggctgtaaatatcctaaggaaggatttgactggatcagccttggagttaggagggcagggcctgtgatgggcagtttcacctgaattttatggttagagctgaggaggagccatcttccaagagaaaagggagaagtggctgggactgacctgctttgacttcttaaattatatccattgccattccatgagacctcgcttcctgccaggatcgggggcacacaggagccatgtggtctctgccagccggtcgcctccatcagattccttttgggggcttctcctctagaggctccacatgaagtcccagtgctacagtcctagttattttgccttcttctgcctggttttctttcagatcacctcagccagttctcagacacttaggggacatgttctctgcaggaccactctgagggactcttctgcatattgctgacctgagaggatggcctcagagctgacttgggcaatcctccccaacaggaaggggagacattgcctgccactgaggaaacaggtcatgaaggtggagataagctgcaaggggcgaagcaactttatgtcagtggaaaacgtgtctctttaaagctgctatgtgaacagcttttacagtcattaaatttacctaaactaaggttaa

SEQ ID NO: 12872 - DNA, 3064 bp, Homo sapiens; identical to SEQ ID NO: 12871

SEQ ID NO: 12873 - DNA, 1654 bp, Homo sapiens
gctcagtaaacgctctgccactgacctgtgtggcaggaatgatggaaaccttaaggtgatcttccctgatgcagagatggaggatgtcaataaccctgggctcagggtcagagcccagcctggggactatgtgctggtgaaggtgaggagtccttttgggcttttggcttgcactgtgaaatgagtgttggtttggatatttgtggtaataaagttttttcctagagacacattttagtaaaataaaaatcccctctcaaccagtacaatggaagggcactttggattggattttagactgctccttactaatgccttcttattcttcttacctattctcctgccctggaagcgttctttgtgggaatttggtgagtttggagtatgcagtggcatgtagtttctcgctgcagagaggccaggaggtggagtgatttcgagtgagtagagagtgttccctgttggagatcaacattttctttgtgatctctgacggctcaggcctctttaacttacatgtgctcgagtttcttgggtctcttccctggactcacagatcagctatatggctgtgggattttctctccctttctttctctctttctttctccctttcactggcgatatgcttctcttattgtctccttccatttcttcctttcttctgccttctcttctcacactgcccagttctgctactgccaccttccctgtcttgttctcatatctgcttcgcctcagaaccagaagctggcaggacacagactgatgccctagagcatccacagaagttcctttaagggcagggaaaatgcctgttttgtttctgtttgtttatctttgtttatcttctagcacctagggcaattccgggtacaaaatatgtacttagtaaggatttactaatggactgacttgctcttatgataagacatgtgaccacagataactttggggtcacattcttttagctctcaattggaggagagagaacatttctcaccaaatgttggctgtaaatatcctaaggaaggatttgactggatcagccttggagttaggagggcagggcctgtgatgggcagtttcacctgaattttatggttagagctgaggaggagccatcttccaagagaaaagggagaagtggctgggactgacctgctttgacttcttaaattatatccattgccattccatgagacctcgcttcctgccaggatcgggggcacacaggagccatgtggtctctgccagccggtcgcctccatcagattccttttgggggcttctcctctagaggctccacatgaagtcccagtgctacagtcctagttattttgccttcttctgcctggttttctttcagatcacctcagccagttctcagacacttaggggacatgttctctgcaggaccactctgagggactcttctgcatattgctgacctgagaggatggcctcagagctgacttgggcaatcctccccaacaggaaggggagacattgcctgccactgaggaaacaggtcatgaaggtggagataagctgcaaggggcgaagcaactttatgtcagtggaaaacgtgtctctttaaagctgctatgtgaacagcttttacagtcattaaatttacctaaactaaggttaa

SEQ ID NO: 12874 - DNA, 1938 bp, Homo sapiens
cccaactgagccctacctcccttaccaaagaagttcatggccaagccatttttatttagcaaataagggcttgttttccttgattgtccaaagcacaaggggagaaaaaccacccattggcttcatgtttacctgcactgcggggctgtcttgtctgtttcagttctgtttcacatgtggagttttcactgatttcaagaaggaatgtatgcatggagttgagcaggatacagtatcctgaatgagggctgaatgttctgcactagaagtgagcgtatcaagtctttgtaactaagaatgtgatgttagattgtagctgaggggaagaaacacaaatggcttgggttgtatctaaatcctgggtctgccaggtgaaaacttagatgttgctttcaaatgacactaatgatttctttcagtgctgtttagcatgagtggtcattgcaaagagctgtgaccactgtactacccagtatggtggctactggtcccatggggctcttgagcacttgaaatatgggtaatctaaatggagatgtggaaaatacaaactggattttaaagacttagtaaacttagtattttgaaagagcaaaatagcccattgacaattttatgttgattatacatacattaattttacttgttatcttttaccatttttaagtgcagctactaaaaatttaaaattctgtatgttgcttacattatattgctcttggacagcactatactaaaggcataaatgtaagattgtgtttcagagggcacccgagcactgcttggtttatatgtattttctaggccttccctttggttccctggttacctttaaaaatacatgtcatgatatagacatggcatatctgagacaaaccttggactgagacaaacctgagtttcaatctcaattgtttgtttgtggcttgcctctcagcatcttaaattctctgaatcttaagttcctccactgtgtaaaagaaataatatccctctgacctcactgtggttaggcaagagacaatgcagtgattttttcagtaatattatgagacattttattactataattaaatgattgtattttccccagattgacaaattcaaattttctattttgaaatcttattgcaaatgttaaaaaaacaaacaacccaccctttggctcctgttatgttgtcttccagctgctagtaatggaattgggacagctaatgttccctgagagccatggggaaccaggcagtgtgcttttcaggaactgtcttactttatcctcacaacaatcccaaaaggaaaaacctagttttatctctatttaatagctgcagtgactgaggcaccgcaaggttaggtgacttgcccaaggtcacacagcgaagcattgagcccgggcagtccagctctagagccgtgttctttgcctccgcccaatattgtccaccagtgaggagaagacggaaccaaagaaccaacagtgaatgaatactaacaggaatcctggctttcatggacatctattcttgtgatttgacagtgtatatgtgagatacttcctcttagaatgctttttctaattcatacagtaggcttaaatatgtcatggttttagagttttccttaaggaatacgttgattcccaggcacattacagtctgaatcagtcttaagaaattccaggatagaggtggaagaagttttagtaaattgttgtgcagcatggtgaccgcagttaataataatgtattatatatttcaaaattgctgaaagaggagatttcaaatgttctcaccacacccacacacacaaaaaaatgataagtaggtgaggtgatggatatattaactagcttaatttaatttttctcaaaatatcacattatatttcataaatacattcaattattattagtcaattgcaaaaaaaaagaagaagaa

SEQ ID NO: 12875 - DNA, 1938 bp, Homo sapiens; identical to SEQ ID NO: 12874

SEQ ID NO: 12876 - DNA, 1930 bp, Homo sapiens
ggattagaaggcattgatgtattaatagcttttttttttttttttctcaagcatggtactaattcttaggtggggtcaagatgattgcggggggcagtgggggcagcctgtggtcaacgttcaaagccttccagtcatttagaaagttgaaatgtgcttggtgctgggctagaatcattaggaggaaatagctgcaaacctggaaacgtccctggagaatacttaattcaggaataaaggtttggattgatgagggctaaaataaaacttggcagcgacagcattctagtaacttttagccacttctccccatctcactggggtattcctgctggtatattcactagcctgagctctgctcctgagagggctgcaggagctgggtgggttgggagacacaggtgtgtgggaggcgccttcaccaagtgccgcacaattgccgggtacccctctgtgcctttaactggtcggtaaacagaaagcaggatgtgcttatctgaatagtgacaacagttgcaagcactcagtcacaaagttcagcattctggctttagatggaccagcgtggggctctggaagctggtgacttgggagtgcctgccgtacacatgggtggggaagggatggaaagtttgtcaaggacttgccgagttattaagcaaagactctgtaagtgcgtcagaatgggaaggcagctcagaacctttccactccaccctttttgttgttggaaataggtaaactgaggccagtgaacaggaatgtgtatttcaataataccaaagctaacttctatcactgtgagttgtgtgccaggccctgggttcactgccttctgagtgttgtctcttttaatctctgccacagctctgtggggtaagcactggtgttatacccatttttcagataaggaaacagagcctcagagagtcaggttacttcctcaaggtcatagaactagtaagtcacagacctagggcacaggagcaggtctgtgtgggggtcagagccacagctgtcccccacacgctgggggcctcctccacaaagcggtttcaggtggggctcagcccacctctgggggaacccattcatatactatgcaaggtttcacaggtgtgtgaattcattttccattgctgcgtaataaattaccacaaacttaatagcttcaaacaacacatatctgtcattccacagtttctgtggaggccaggcctggttttcctgagttctctgctcagagtctcacaaatctgtactcagggggtcagcctgattatggtcccacctgaggcttgggatccccttccaaactcactaactgttggtggaattcaattcatgcagggagagcactgaggctgcaagctcatggagaccacccactgtttcctatgtgtggccctctccacaacacagccctttgcttcttcaaaacccaaccaaagaatctctgtcttcaggaacagcctccgaccctctttgaaggggctcacctaattaggccaggcccacagaggaaaagctctcttttgattaactcagagtcaactgattagggactttatacctgcaaaatctcttttgccacacagcataacttaatcaaaggaatgtattccatcccattcatggatcctgcccatactcaagggaaggccataatacaagcatatggtcattaggggccatcttagtcactactgttcgtggattgttctccagcttcctggaggagaggagagcaggagacagagctaagagtgtttgtaaaatagggcagtgggaaaaggtaggtcttgtgagtagcaggctacttaagatgcctagtgggtctaaatgtcaaatgctattggcagattttccgtgcaaggtatgaccaaaaaataattatttcattaactttgtgcaaaaaaaaaaaaaaaaa

SEQ ID NO: 12877 - DNA, 5741 bp, Homo sapiens
gaggatttttgcagcgtttgcagaaaaagtggccagttactgatgtgcgacacatgttcccgtgtatatcatttggactgcttagacccccctctgaaaacaattcccaagggcatgtggatctgtcccagatgtcaggaccaggtactgtgggtgggtccaacaggggaggggccgaggaggacaaagacacggccatcaggaggaattcctttcccggggaaatggcagtctcttctctctcccagtccgtctccgggctgcatcttccctgtttatgacacagcacgcaggcgcatggccttcattccctcagaagccctctgccatattactgagctggatagatgcttccttgtatttgaaatgacttgtcttctctttaaaagtcaagaccctttaaagtccagtgtgcctcattctctaggaatggtccagaccaagtatatggttttaaaactcttctttgggaatgaaattaagggaaattgcccagttgattaattaaaataacaccctgggccaggcgtggtgactcaggcctgtaatctcagcactttgggaggccaaggcgggcaggtcacctaaggtcaggagttcgagaccagcctggccaacatggcgaaaccccatctctactaaaaatataaaaattagccgggcatggtggcaggcgcctgtaatcccagctacttgggaagctgaggcaggagaatcgcttgaacccaggaggtggaggctgcagtgagcggaggtcacaccactgcactccagcctgggtgacaagagcgagactctgtctcaaaaaaataatactaataataaaacaacacccatttcacttttaacctattttgttatatcaggctcagagaactaagtgtaaagtgctgtcgatattttatagacttaaaaggcaaacatattagtaactgtcctagcctccctcgttctctctttggtttctggtcgccttttctcaactatgcatgtatatttatgtctttatgattttattataagctgtctcaagtcttttttagaggtaggcaaagtataaataataaataagcaagcccaatagctcagcaagtactgggattctgctcagttctttggaatcctgctttgaacaaattctggttttcccttgtaatattgtcctcatcctgcagcctgtggtgcagcggaacacttctctcagtgtcctcctcctgatgctgctttgtgaccttctgacgatttttgacatagggtctagattatactttagtatttggaactaatatttaattttcttggtcaggctgtctttgagggacatcgaaatctaaaattgagacaggcagcccatgtcaggtcaaggacgaaactgccagtggctgctgccatcatgctgatgtgcagcttttgtgttggtggttctagctgtcgggagtggttgggtgtcatgtggcgtgtgtgaaaagataggaatgctcagccaagtcccagctccttctaagcctgggctcaagtgtcctggctcttcctgccttgaacttgattctcctaagctgatatttggaactttttagtccagaaactatagaccagggttttgcaacactgctaccataaatccttcctggattttatctgccagtagccacagataccactgctagctgttacatagaggatgtgtgtttaaacctccttctcaaggtaaaattctaaaaatcttttcagatgctgaagaaggaagaagcaattccatggcctggaactttagcaattgttcattcctatattgcctacaaagcaggtaaggagttatccatacccacttttttgtaagcttccccttgtttgaaaaaaatactggcagtatttgttttattctcaaaagggaatttaaatttaaaaatgaaaaccttttgcccttaactattggaggaaacaaagcaaatgaaaactttttattggataaagtggaaaacttctgtagcatttattattattattattcatttattttttgagacaaggtctcactgtatcaacccaggctcgggtgttgtggcatgatcacagcccactgcagcttcctcctcctgggcccagtcgatcctcctacctcagcctcccaaatagctgagactataggtgtgtactaccatgaccagttaactttagtattttttggtggagacaggtttcgccatgtcacccaggctggtctcaaactcctgggctcaagtgattcacctgccttggcctcccaaagtcctaggagtacaggcatgagccatcatgcctggactgtagcacttcttgggggaagaaaatgagatgtggtatctcatttatgtaaagccagacccaagccactgacagttttagcatactgtacacagaaaaaggaaaagtccaggtgggcagattctctgcactgggttgtaggactcatgggagctctggggaaaataccttctttggcaggcattctgagcacagaggacatttcaaagaattaattgtcaaaaaccgttcctttttttttttttttttttttttagcaaaagaagaagagaaacagaagttacttaaatggagttcagatttaaaacaagaacgagaacaactagagcaaaaggtgaaacagctcagcaattccataagtgtaagtaaacctcatgccttcagcagtcgatacataggtgcagagacctaggcctttccaatatacgtaacagtacgtgtgggccccaggctgtttcgggtccttctgtttattaacgtgattaacttgggcaaatgcagtttgccatccagttagagttcagacctcaggtacaggcggccagttggtaggtggtgccttacccaagctctgtaacatcctcttggctttaatcagagagaggattttcagtcttcaggctgaataagtaacagctacaacagtgtagccatggccctgcgtattcctgacagtgtgtggggggagtgtagcgcctcacctgacactgagcagacacagaccaggtcccctcgtgtgattcttcctagtcacctgagcgagtgggcccatccgtacggccctccctcgctctttcttccacaccatgctgattgcatttcccggttttcctgaccagtgtgaggaagcgggctttctagagacaagtattggaagtaagtactgcccagcccggcctgtccaagtgggaaagagggttgtatttgcagcagggggacagaggcttctcccaggcaaggagccagtcttcttttccattgagtaggtcacccttgttggagtgaagtgacctcagccctcatggataccaggtggtgccttgtacttggtggcagttgaactgtcctgcttacctgctttctcctcctcaccatacctacccatggcatgcagatttaacacctctttcctctctttccctgcctaaaatagaagccagcaggtgtgggaagctgagggcaaaagggcaaaagactctaagtccccggctgagcagaaggtgtactggctgcaggcctttgtccttggggcttcgatcctcctaaatgctgctggcctgtcgtctcacttcctgctgccctcagatggaatccagatagcactgtgtgttttccaccctggagagctcagtccagtcctgaaggctccccagttagcatgacagaagcatatcaaaacctgcctaaacaggctgcaggacagctgtgggaactttttttttttttttaaacaacctttgtttggaagtctgatggcggctctgccggtttgtttttaagcgttagtactcctgtgtgttggtgcccgcatgctctttctccctctgttgcctctgggacctgggaccccccagcctacccactccacccgccctgttccttaggtggtagccgcccactccactgaggaacacagcaaggcccaggggctgcacagcagccagcagagcttcttctccctgggcagagagaaggcgctctgctcttaggggctgccaggcctgttagaaaccaggcggctcagtgccactgcccttgtcatttgctgcagaaatgcatggaaatgaagaacaccatcctggcccggcagaaggagatgcacagctccctggagaaggtaaaacagctgattcgcctcatccacggcatcgacctctccaaacctgtagactctgaggccactgtgggggccatctccaatggcccggactgcaccccccctgccaatgccgccacctccacgccggccccttccccctcctcccagagctgcacagcgaactgtaaccagggggaagagactaaataacagagcccctctaggagaagccacgggatcccggcggcaaggagaacagaacactgaagactctagaaaagcaaagccggatttctggaaagtgcagaattcttttggttctttggttccagagagagagaagatgcttgtgccaggtggcaccagagtttgccaattgatccttcttattctgtgtgtacatgcaaagattggaccatgttacatgaaatagtgccagctggaggttctttgccagcaccatgccaagtgaaataatatatttactctctctattatacaccagtgtgtgcctgcagcagcctccacagccacgatgggtttgtttctgttttcttgggtggggagcagggacgggcggagggaggagagcaggtttcagatccttacttgccgagccgtttgtttaggtagagaagacaagtccaaagagtgtgtgggctttcctgtttctaaactttcgctactataaaaccaaaaaaaggaattgagatttcaccaaccccagtgcccagaagagggaaggggagtggctggagggagcagggggtgggacagtgtatcaaataagcagtatttaatcacctctggcgggggcctcgtgcaaggggagactgacaccaagaacagccagtaggttcttctcccctgcactctgctccctgcgcggtaaccccaccactcctgaagcctgcccagtctccttccttccctgcttggtgagtcgcgcatctccgtggttatcccgctgtctcctctccaagaacaagcagagcccgggccactggcccttgcccaaggcagggaagaaggatgtgtgtgtccaggaaggaaaaaaaggtggatcagtgattttacttgaaaacaagctccatcccttttctatatttataagaagagaagatcttgagtgaagcagcacgcgacccaggtgtgtgtgaattgaatggagacgtttcttttctctttctttaatttttgtttttgttctttttttctttaaggaaagttttattttactgttcattttactttcttggtaacaaaaactaaaataaggaatagaaaagctgtttttcaggctgacagtccaattaagggtagccaagaccttgcatggtagagtaggaatcatagtgtcagtgaggtcccgtgagtctttgtgagtccttgtgtcatcgttcgggcactgtttttttatgcaagggcaaaaatctttgtatctggggaaaaaaaacttttttttaaattaaaaaggaaaataaaagatattgaggtcttcctagtgttacttaaattaagatcaaggtaagaaacattgtaaaaaaaaattacaaaagtgctatttgtttcctaaaaacagtgatttctattaaaaaggtgtcagaactggagaaaa

SEQ ID NO: 12878 - DNA, 3188 bp, Homo sapiens
  SITE (2827): n equals a,t,g, or c
gtgtgtgtgtctctagactggtgggccagtctccttgaaggacagaggcggagctccccacccttctctctcctcagaaaagaccgtgctctcttcttggtgcagggatcttgtctcctgttgtgaagcccaaatggaagcgtggatggtatcagggccctacccgtggtcttctcagattctgctagagcaaaaggctggtgcctaaataagatcccttcctttggtgctgcttttggtctttcagccaccagcattatgagtgcctgggggacacctccgagggaactggccagcggagctctgtggtgcgcacgcaccctggccgtgacaggagggtgcgggagtacaggctggctgcatcagcccttggtgcttagaacagaggaggagtgacatgttttgagggtacgtctctgagacagagccccagcgtggccttcgctctgtcttgcctttggggagaggtctgaagctcccactcctttctctgcctgttggctccaggcaccagaaatttactccactccacccacccacaagcctcctgggtgaccctgggctagaattgctgcgcttgcctcggcttggccggttgtggcctctccttgagaaaaccagggttgtgaaagactcagaccattctctcatcttgccttgtcagaagtaaattgtgtcagatttgtgctctcgctggagacctttgccccttgcgtgcccctggccgatgggagggcggtggaggctctgtaccctggccctgctggagcatctcccccaagcccactccaggccctgggaatggccagagtctaggagaggtagaaacgatcctatcagcttctctcccacccaattaggcccagagagacaaagacagatctgaaagcaaatgcaacagagaagagacacttcttagagtaaaatgtgtctcatctctatcagccatcgcctttcatcttcccaggggcctcagaagaaggaattaagttaggctgaacaggcctcagagttaggccctggctgcttgattggctgagggggaaagagttcccttttctcattcagaaaccaaggtgctgtgtctagtcagggagccttggagatgcctggactagttggaggaatcgttggcagaggatcagagaccagcagcaggctgtctgccctgtctagagctcttcccctcaacttgtctgggcccatctgggggttgccacacaacacctaacttaccttttcctgaaagaagttgggaaaccatcatcactagaggcctttgctcagagaggagctgccttaggagtcttgggtcggaggacggggctaggaattgaccagggctttgcctgccgccctcagcagtgtcgggtacattctgacctcgcctgcagctgggctgtggattcttcctgacattcagatgtgagctgttttgggagtcagctagtatggagtacgagatgcaacccagcccccaaacctacattctgcactcaaattccaaaacactgctttactgtaaagaagaggcccctggcacccaatctccctgtccttcactgtcccctcagacctgggcggggaggggggggggcctgtgaccacctgagacatacgctcgggacactgccccaccccagccacctccacttgcttcctcctccttccctccgctgctctttccccacggcccagaatttagctgctctgacagccacttttgagaccagctggctttgtagtcacttcaaagagctggagcggctgcccactgggccctgactgggagtcccctgccagctcctgatcaggcgctgcgccctggtggcagtgatgactgggagtcccctgccagctcctgtccaggcgctgcatcctggtaacagtgaggccatgttgctgtcatctccacctctgcattcttgctgcctgtgggtcctttttctttcatggagcctgctgggtcttgtctcacctgtgctgagctcctctggggttttgatttcttccttccttatcaggccctttggggtaagcctgctggttgtacctgacatagggaggcagttaggggcagtccctggtggggccgccctggcagcctccagctggcaccatcgtgtgcctggtttccctgcaacacctgcctctctgtccctgctgctgcttggctcaggcccaacaggcagcgtgcatggaggtggttacacacagctgtttccgtgagggtgaccgtgtctgcagcacgcttccgtctccgcatgcacggctgcctctccagccacctctgatacttctctcttggggccatcagagcctcccttgggctgtcacctcccagctcacacacactcttcagtggtttcctctcttcattctcttatagggcgtggtccttcttatttatctaaagggctgaatttaggagactttttacccaggggcaaaaggctcttagggtaatgagatggatggtggcccaggtgcattttccagggcctgggttctccagatcccgtggcttctgttgagtggaggcaactttgctctgtgtgaacctcgcccctgtccctctgccgggcacccctggcaggaagcaggactcccatcctcaccctgacttagactgtcctctgagtcagctcctctccaagacaggagtgggcagccctgggcagtcttctggccccttgctaaagtgaggggcaggaagctggggctgccctccagaaagccggggtaggaactctgaaaaatacctcctctaaacggaagcagggctctccagttccacttggcgccccctcccacaaggcccttcctnccttgaggacccccaacccccccctccccttccccagcagcctttggaccctcacctctctccggtgtccgtgggtcctcagcccagggtgagctgcagtcaggcgggatgggacgggcaggccagaggtcagccagctcctagcagagaagagccagccagaccccaaccctgtctcttgtccatgccctttgtgatttcagtcttggtagacttgtatttggagttttgtgcttcaaagtttttgtttttgtttgtttggtttttgttttgagggggtggggggggatacagagcagctgatcaatttgtatttatttattttaacattttactaaataaagccaaataaagcctctca

SEQ ID NO: 12879 - DNA, 218 bp, Homo sapiens
gttttcttagtcactgttgttaatctcttattgtgcctaatttataaattaaactttattgtgggtctgtgtgtatagaaaaacatatttatagggttcagtacggaggtttcaggcatccactaggggtcttggaacatattccccaaggataaggggggactattgtactgtccccacccagggagccttagctatgtggagtgagtaggggcatg

SEQ ID NO: 12880 - DNA, 795 bp, Homo sapiens
gtcctgatcaccgcactcctcatcgtcctcacctaccctgcctggaccttcatcgactgcctggactcggccagccccctcttccccgtgtgtgtcatagttgtgccattcttcctgtgttacaattaccctgtttctgattactacagcccaacccgggcggacaccaccaccattctggctgccggggctggagtgaccataggattctggatcaaccatttcttccagcttgtatccaagcccgctgaatctctccctgttattcagaacatcccaccactcaccacctacatgttagttttgggtctgaccaaatttgcagtgggaattgtgttgatcctcttggttcgtcagcttgtacaaaatctctcactgcaagtattatactcatggttcaaggtggtcaccaggaacaaggaggccaggcggagactggagattgaagtgccttacaagtttgttacctacacatctgttggcatctgcgctacaacctttgtgccgatgcttcacaggtttctgggattaccctgagtctcaaacagttggaaactagcccactggacatgaaagccaagacataggaaagttattggtaggcaaatcttgacaacttatttttctttaacaacaacaaaaagtcatacggctgtcttgctactaccagataaatgatgctgctgtgtgaaaggaagaactgtctcatagcggtcattggtcgtccgtggtggttggttgtgctacagttgaacccaggctaaagaccataatccggatctttaaaggcacaca

SEQ ID NO: 12881 - DNA, 3465 bp, Homo sapiens
ccgcgccccccccccccccgcccggcccctgctcctctcgctgttgcacgggctttggatctagtcatgggctggcaggaattgtggcctggcttaggaatagctatgagccccactgggttctggagagccagtagagatggggtgatctgggaggctggaggtagagcctttcttttccgttacaaccttgcctagcatggagttatttctaaaatgggaactttggtctaggagaaggggtggcaccatatgaaacggcattccttggacagggtgacttccttatcgtttatttggtgattttttgttttgttttgtttgagacaggatcttgctctgtttcccaggctgtattacagtggcacaatctcagctcactgcaaactctgcctcccgggctcaagcaatcctcctgcctgagccaactgagtagctgggactgtaagcatagaccaccatgtgcccagctaatttttgtagagacagggtttctccatgttgcccaggtacgtctgaaactcctgggcttaagtgatccacccacctcagcctcccaaagtgctgggattataggcatgagccactgtgcccggcctcctccttgttatgatcaaattagactgtgcctggttgggtggtaagatcactctgaaagaaagctcactgtgaagagatgaaaggtggaggcagagctgtgaggtcatggggaaaagcctgctttccttataagtcctgctgttcatgttggaataaggatctgctcttccttgtttccatgcattttgcaggattccaggtaccattaccacactcttctgacccatgaaaccaactggctgctcacacatcaccaaacaggttgggggttagccttcagcacaggtggatacatctgggattcactgagattcctgccctctcctgcttcctagtggtttgggacaggccctctgcccatcgtcagcagttttttgctttcatacaaacctggaaggcactggcatctgcctaggaaagtggatctgtgaagaacagatgaactcaatcctttctggagtctgacaaagaagggataggcttccttgacattgcctgtcctgacaaggcctccctgacattactcctccaatttcacagttaccttctgtaaatctattttctcatctactgaatagaatcaggcgccctttttgtcttcccacctcttatctcttggcaattttaaggggaattaatgcaagaacaactttagtgtctcttgggaaaacaagccaaccaaatacaaaacccattaagcctactagggtgagtcctcttaacatgggaaggcgatgattatgcaaacaccggagttccctcctcttcagttcctaagaataaagaacaggtatcaagaactttctttaaagttagtgtaactatagttaacaaagtatccattgaagtttagtgcctgtaggactgagccagtgctttatcaacccaacacatcatcaccatgtgcatactctagaaaaaaaaatagcttccttaaaagttacagaggctcttaacgtgttaaaaccgaaaaatcacatttttcttgatttcaaatatgttctacggccttactgttgggatgatatttagtatgtaacttagcattccaatttctcaagaatttttaggccgggtgcggtggctcatgcctgtaatcccagcactttgggaggccgaggtgggcggaccacgaggtcaggagatcgagaccatcctggctaacacggtaccccgtctctactgaaaatacaaaaaaattagccggacgtggtggagggcgcctgtagtcccagctactcaggaggctgaggcaggagaatggcgtgaacccggtgagcggagcttgcagtgagccgagattgcgccactgcactccagcctgggcgacagagcgagactctctcaaaaaaaaaaaaaaagaatttttagcaaaacatcctgtttttacttaaaattcttctcatatttattatagttagaaggcaaagatcaagatgacctgccgtttgactgcttttacatcaaactctgcccagtatttgcagcacaactcaggggaagggccttagcttacaggtactcccagccttcatctgcccctgcagagcagtggctgtcagccggatgcggcacttttctgtattttcatccacacagctgcccagccagagttcgcaacactggatatttacaccaaataattgtggttgacttgtctgaagccagctgacaaaaggatcagcttttcccacttgtattttttaaaaagagggattgtgatcattgtcacagagtgggtgctggcctctcatatatatgatatatatatatcattttatatatatatatatatcatatacataatttttactgctgtctctagttttaagtcccaacaataggaaggccgatcagctatattgatatatttaaggctgtacttaactaatttgggctgaggatgaatatatcagccacagcacattaaagaatgagccaaggatttgtcatggttggtcactttttaaagtatttgattactgcaactggagaatgaaaagtgtatattggtgacgccaacctcagtttctgagcactcctgctctgtggtgagaatcagacaaaaattcatcggggtgaaaaaggcattacctgattcacacccttgtcttgctagccctcttccattcatttctcacacagcactttgctctgttaaatcctctctctgtctcagaccattgcttgccccttcaaagggtatggttcaggctcctttcaagacatttggagtttctctctggggaaagagagccccctactggtttggcttcagtctaggtccaccatccctctcgatctggcatcttggagattaatttaaaaggcaagctcaccacaatgtaagcctatggtctggccaaccttgcttttgggaactgtgacaccaaagcccccaggactatctgcctctccaggagccagatagaatgacatgcctttttcctaattgtccacattccacccccaacccactgccactgtgggccaagccatccatcttgcaatcttcatctaaaacagctctcatttcatgccagttttgctcaaacctgcaccgtcacaagatattcagaagatgaaaacgtagaagacacccctgaattaaaaacacttacatagcagtggctggaattactccaaaacgtgcccagtgatcgcactgtaacatgggattttctcacccaaataggcaactcatgcttcctgagtgtaatcaaagcatgtggtgttttggggccatatgcaccaggtttctattttagaaaccttcagctgtcttgcttatgtactgtatgtaaatttattctttttaaaaatcacttttatttgattttgacttattaaatgctttaaaagcca

SEQ ID NO: 12882 - DNA, 10995 bp, Homo sapiens
gcgccattccaaacatggcggctccactagggggtatgttttctgggcagccacccggtccccctcaggccccgccgggccttccgggccaagcttcgcttcttcaggcagctccaggcgctcctagaccttccagcagtactttggtggacgagttggagtcatctttcgaggtaatataagacatgggcgtctttgtccctagccttcccttttttctgaaacgtgaactgcgcgtacgcgtatctcctccagggatccgagcaactaattcacaaatggggaaactgaggcttaaagtaagtcacttgctttaggcttccccgtggcccgtattcaattcaggtctgctggcgggggcgcgtaaactcgacgtttgtggaaacgtgaacccgaagtttgcctaaaccccaaacttggaacccttccagattcccagccggtccttagtctcatccccgagcaccgtttcttgcatccctgcatgtttagtaagaggctcaagccttttcggagctgagagtttcactgctgtatcctgtatcctttccgctgggcttcacctttaaacgatcctaaagggactcttaagagcggaaattgacttaagttaccaggcgcagcttggtactaagagctgaggaaggaggaatgctggaggttagggagggagggaggcacaggtgacccaatctctcagttttgcccaaggagtttaccttgtagcaagaaaggtgaactgtatattgagggaagatagagaggtgaaaataagtgctctggtgatttccagtagtctttaaagtggaagatgagctattcctgtgtagtaataaagtaatgtacgttcaaattggagttaacttttccacattttaaatcccagttttgccgggcgcggtggctcacgcctgtaatcccagcactttgggaggccgaggctggcggatcatgaggtcaggagttcgagaccagcctgaccaacatggtgaaaccctgactctactaaaaatacaaaaattagccaggcgtggtggcgtgcgcctgtaatcccaggtactcgagaggctgaggcaggagaatcgcttgaacctgggatgcggaggttgcagtgagcggagaccgcgccattgcactccagcgtgggtgacaagagctcgactccgtctcaaaaaagtaaaataaaatataaataaataaaaatcccaactttgtgacttttgtattgtatctaatagcacagtggtaaatgaatataatttgcaagcgattattcagactgcatggacaaaatgcttttaccacacggatgtacaaagatttagaaataaatgatttgagatggagtctcactctctcgcccaggctggagtacagtggcgcaatttcggcttactgcaacctccgcctcccgggttcaagcgattttcctgcctcagcctcccgagttgctgggattacaggcacctgccaccatgctattttttttattttttagtagagacagggcttcactatcttggccaggctggtctcgaactcctgacctcgtgatccacccgcctcggcctcccaaagtgctgggattacaggcgtgagccactgcgcctagccagaaataaatgatttaaaggacagaccgtttaggaggaggaggaggagacacctttgaggtggtgctaagtggtaaaggaaggggctggtgaactttagagcagcatctagcattgtgcttgaggggagctggctctcagtcatgggcacttgctgaaagactggccctgtacaagtcttagccaaagttgactcccagcaccctgctgcttaaaaacgtacagtggctgcttgttgcccttgagataagatcaagatgtttagtgtggtctcccaggctttgcatgttgcgttctctccttcagactcgtttccttactgcagccacacaagactttcccacgtgtaccatttgttttctctttgggcttccaggccgctcctcagctcactgcatcacttcctcagtggacccttccctggccttctttttaatacttaccattaaattcggctccatgaagtcagagactacctgttttgtacccccacccctcacattgtgtaacctgtagtgctaatacagtggtagtagatagcaagtgctagatgaatatttgtcagacattgaaggaatctgtagtgtggagcctgtagtgtagttggcttgtgcacagaactccttgcctgattcacatatatgtctgtaggtgcccttgagagagaactccctctgggacttgattatccatacagagaatacagagaaaaccagtccctgccttcaggaagcttgtaataaacggcaggcagttgccttgttgtaggatcactgctctgatagaagaaacctggggtactgtgggagcacatataggtgtggacatcaaagaaggcttcccagagagcaggaaagccaaagaagcattttgacttagccaggtgaaggggagtgggagtggtgcgagctggatcctctctgctgctgggtgatcacgatctgtctagtcttgtctcacgattcaattcaaaggccacattttctttggaacttttcctgtttccttccttgtgttctgtgtggacctcaattttcacagcctccagtggcacatagcagcacctacttacctgcttctcattcctattggggtgccactccttgaggtctctgtctgctcattctagctgcttagcacatgctctttgatggaaggaatttattgagctcatgcactcttgattttggagggaacgttggagaccatctagttccatttcctccattcataggtagagaaactgaggctcagtgagggcaagttacttgctgaaagccagccgttgggtttgtggaaatgaggacaagcacttactttccaggcaaaggctctgttttagccatgcttttaaaaagctgttctctttctaggcagatgcggtggctcacgcctgtaatcccagcactttgggaggccaaggtggctggatcacttgaggtcacgagttcgagaccatcctgggcaacatggtgaaaccccatctctaactaaaaatacaaaaattagtggtctctggtggcacacgccttaatcccagctacttgggaggctgaggcaggagaatcgctgaaacccgggaggcagaggttgcattgagccaagatcgtgccactgactctagcctgggcaatagagtgagactccatctcaaaaaaaaaatatatgttctctttctaagctaccacacattttcttcttaatacagctgtccaactgtctataaaggcctgtgtatcttttttttttcttttcttttcttttttttttttttttgagacagagtctcactctgtcacccaggccagagtgcaatggcacgatgttgggtcactgcaacctccacttcctgggctcaagtggtcctcttgcctcagccttccaagtggctgggactacaggtgcgcaccactacgcctgactaatttttgtttttgtagagacagggtttcaccacgttgcccatgctggtcttgaactcctggactgaagtgatccacccatcttggcctccaaaattgttgcttacaggcgtcagccaccatgtcggaccctaaatttttttcttgagtgggtggagggcagtaaaattcttgagatgagatttcctgccaccctgtctggtaggcctcctggctcaggggagctggcccaacttttttggccagtttgtgactggttggcctattaatgggatgttttccagtagccataggtctcacaaaggaagtacatcctacccacatcccaaacccaacaagagtcaactttcgttttttttgagacagattctcgccctgtcacccaggctggagtgcagtggtgcagtcttggctcactgcaacctctgcctcccaggttcaagcaattctcctgcctcagcctcccgagtagctgggactacaggcacgtgccaccatgcccagctaattttttgtatttttattagagatggggcttcaccgtgttagttaggatggtgacttcgtggatctgccttcctagttaggatcctgacttcgtgatctgcctgcgtgggcctcccaaaagtgttgggattacaggcgtgagccaccgtgcccagccaggagtcaatgttcaaagtaatcctgagaatgggcaatctgtttttctgatttactttctctgtaaatcaagcgcgggagctgcaggcaggcagaatttttgctcgttaaagggccctcacatgtaggtaatgttctaaatttgagctcagatctgtctgcctcacaccaagtgtagtttgctgattgctgacagagctccactttcctgtgtttgaggcttcttttctaactccttttccaactgccatgctgttctctttctgtgcctccccaatctccctgcccacttcctgcagtgggcctgctttggtacatttccttagagttgcttgtgcacagagctccttggctgattcacatttgcatctgtataggtgccctttagagataactctctctgggacttgattatccatgtgataccaaccttgtcctcttaggccatccagtcagtaatatgtgttattaaacacttcccttgtgccaaggcagtgttccaggcactaggaggacagtggtgaataagacagacaaaattctcatctactagtaggggacagataataatggatgaaaataatggatatgatgtcagttaattatgtgaaaaacaataaaactgtgcttgggtgtggagcatgagcaggaggggcacagtttagaaagggtagaccggctgctgtctctgagggggagaagattgtcctgagtcctgaatgggtggtgatgtgagttgtgtaagcaccagcaagaggccacagtggggctggaagagtgtctgggcctggtgtggaataagatacagggaaggggcatgtagtaggacagagaccagatgtggtgccggctcgtttgcctggcgcttcctccatgggcctaattaattggtaaactcagtttaccagatgtttccattggcatggtgtcttgccatctcatatgcaaacacagatgctgccacctcatcagatgacttcaggagaagttatttcttcctctggagtaagatttttgatgtataaatgatatttttttctttcctatgttttgattacacaggcttgctttgcatctctggtgagtcaggactatgtcaatggcaccgatcaggaagaaattcgaaccggtaagcattccctctgtgtacacaatgttctgggcttcagcagtatttcctagttgctaattttatacttcatgtgtttcagtcctgcttttatcctaagacaacatttcagggactaaaatgtgtgcacataatctctatgagctgctgatttttggttcagtttattaattgacatatcacccataacgaatcatttataatgaacttttcgtattcgtactaggtaaagaagaagaccaatagtgtgtactgctttttaaaaaaattttattatttttggaataggtcttacagagaaaagtctcttgtgcttctttttattccccaagttctgtccctaaaggtaaccagagcttctgatttcttcgtaccatattttacatgtttttttttttttttgatggagtttcactcttgtcgcccaggctggagtgctcactgcaaccaccacctcatgggttcaggcagttctcttgtctcagcctcccgcgtagatggaactacaggcatgcactaccatactcagctaattttatatttttagtagagacggggtttcgccatgttggccaggctggtgtcgaactcctgatctctggtgatccatctgtctcagcctcccaaagtatcgggattacaggcgtgagccaccgtgcccggccttatatgtgccattttaactgtaaattatgatgctgattgctggatctctgcattgtctctttttttttttttttttttttggagacagagttcttgctctctcacccttttaagaaaggagtgcagtggcatgatctctgctcactgcaacctctgcctcctgggctgaagcagtcctcccatttcagccccccagtagctgggaccacagtgtgagccaccacatttggctaatttttgtttttttatttttttgtggagatgggatcttgctgtattgcccaggctggtcttgaactcctaggctcaagcagtcttactgcctcagcctcccaaagtgctgggattacaggcgtgagccaccacgcttggcctctgccttgtgtttttttttttttttgagacggagtctcactctgtcaccagtctggagtgcagtggcgcgatctcggctcactgcaacctctcactccctggttcaagcgatccttctgcctcagcctcttgagtagctggattacaggcatgttccaccacgcccagctaatttttgtatttttagtagagatggggtttcaccatgttggccagggtggtctcaatctcctaacctcatgattcgcccacctcggcctcccagagtgctgagattacaggcttgagccaccatgcccagctgcattgtctttttaaagaagatctcatggcttttatgctatattaatatctctctctttttttttttaacctgagaaaagcataacttatctgctgtttaatgttggttaacacatgagaagttgggggttatgattactgctgtggccaagattaaaatccctgagttgtctatgagagggctttgtttttacattctgattattcatttatgagggagataaatgagtctgttgtttttcttattttaataattttgttcctttttttttaaggtgttgatcagtgtatccagaagtttctggatattgcaagacagacagaatgttttttcttacaaaaaagattgcagttatctgtccagaaaccagagcaagttatcaaagaggtatgaactcagttttctcctcagctctataggaagaactaagtggtgccaggattccttttatgctttaaatgagatgtaaccgtttcctgcgagtttcattcaggctttataggtcagtgtgaaatgtggctagtcatccatgtttgggacaacctgaacaagaagtaaagccaaggagtggggtccgaaagcagagtgtcagacggaacagctctgatgtgacttgtgtcatacattggccttcaggaaagatttttcttaaaagattctgccatgtgaaaaaaggacaaaaagccactaacatataggcttgttttggacaaaaactgagatctgtgtccccacttgccttacccagtgccttgcacacaggaatccaaggaatcaaaaagtagtgttcgacccaggttcctggaaactcaggatttcgttgatctcagttgttctaagctagggcatttggaagtgtgttggggttgccacgatgacttgggaagctttaatggcattgaatgggttgggccaggacctgccccatgtgatgtggaagagtgaagaatcatcctgcccaaaaagccggcaatgccctcagtgagaaacactgaattgagattattggttgggggcaatttttgaagtaactagtcccaattaatcaaaaagtctcttttcattcatgataccagctgttggggatagctattcttacagtttatcatgtcagatcatttcctgatgtgaatacttgaataacagtgcaggtatgtccaagactggatggttagtaaaggatgtaatgctgttcttaaaaagctcttgaaaatgtaattttaacagttcataatctgaagtgatagatcagtggtgtggattttcttgtaaacagttgttaacaaatgtttcagattttcagtgttttaggttctcagcagtagcctttggagagaggtactggatggctggggaccaggatgggatagagtctgtaattagtctgttttcaccctgctcataaagacatatctgagactgggcagttcacaaaagaaaaaggtttgatggacttacagttccatgtggctggggaggcctcacaatcatggcagaaggtgaaagacacatctcacatggtggcagacaagagaagagagcttgtgcaaggaaactcccatttttaaaaccatcagatctcgtgagatttattcactaccaggagaacagcatgggaaagacttgcccccgtgattcaattacctctcaccaggttcctccctcgacacatgggaattgtaggagttacaattcaagatgagattgggtggggacacagccaaaccatatcaatctgatttctttttggctgcccttttgaattttgtaacttgcatattactttctataagaaaaataaacgtaggccgggtgtggtggctcacgcctgtaatcctagcactttgggaggctgaagcaggtggataacttgaggtcaggagttcgagattagcctagccaacatggcaaaaccgcatctctactaaaaatataaaaattagctgggtgtggtggcgtgtgcctgtgatcccagctactcaggaggttgaggcaggagaatcacttgaacccgggaggtggaggctgcactgagccgagaccgcaccactgcactctagcctaagtgacagcaagacttcgtctcaaaaaaaaaaaaaaaaagcccataaaaacttatgttagaatctgtcatctgggttaatcaaatagtggagccaagcagagtaatgggcttaatatggtttaatggattctctttgttttgaattgttagcctcttaactaaccagaaccgtatgtgtttttcctgcatttgctctgacttagtccatgactttcatctgcaggatgtgtcagaactaaggaatgaattacagcggaaagatgcactagtccagaagcacttgacaaagctgaggcattggcagcaggtgctggaggacatcaacgtgcagcacaaaaagcccgccgacatccctcagggctccttggcctacctggagcaggcatctgccaacatccctgcacctctgaagccaacgtgagcaaagggcagaggcagttggcctatgagtgggctgatgcgtgaggttggccacacattccttcctgtggacttgacattttggaagaactctttgccagataatgagttcattttagttttatgctcccattgaaaaattttccactatttttataagctgttaatttcttgagtactttataacatgtctgtagcttggataaaccaagtaagtattttttttttgtctttagcaaagtttagactgtgaatatgatgacacagattcttttttatggtggctttgcttgttttaaatttttgcatgacttttcatctttttatgtgtgtttcctgtagtttgatccgaaggaaaagagtatagtagcctgagaatcaggagatgggagttttagtcgtaggccttatgataattaccccgcggtggtgtgtagaaaagtatgtaaatttgctctgttttaagactttgaactacctcaagaagaggaatctaatacaatatttgtaatgtttccagagctctcagaatgaggatttttttgtaaataggtcagaagacgatggaactgtcctgggttagtatagtaatcttacagtaggatccttaggttgatgctgacttctgtttggggtatgtttatattttatgtggtgtttactttttttttttgacatagaaggatatagtgggagcagtgatacgctaacattcattacattctgcagtaatgaatctgtttaatgggtcagtcactgttttcagtagcatgacagtggggtcataggtgagctgtgaggggctaaatcttgctctgattgtctctttctgttttgagttttgtttgcgtgtatcatttttgttctacattttgggaggggaaacattttccgttaaggaaggttgttgccagtggatttgactccaagggactagagtgtcgtggtgggggtggggaggggctgcagggtgatcattggctactgagcctccacagagagcatgtggtgccctgcctttgggagggtattttgctctcgttagttttgtgggcagcctcagattccctgttgagttgctgttaagaaatggagatttctggctctcattgggtaaggttttctgagttttatatcttattagatcacatccctttacccagaacaaatgcttcactgtcttctgattggcagtactcctgtggctttgtgccttgactcattttgttgtcttcagccttgaaggccccttcccacatggactgacatccactcatgtgcctgatccctgaagcctcccagcacccattcagttgcatccccagggcacaggactttgatctcttctgttgccctcgctaggttctccctggtgggttagtgctttgtatctgtctctctgcccctcactaattctacacccatgagaattagacattattctccttaaatatataaggaccatataatctgtatctttttggtgtgtgtatatggtatctggcacatggatctctgattaccagcctgacatcaacaaatcccctcagttacaacgtataggttaaacaaagcttttaaaagctcatgtggtatgacctcaaggttgctaacctggtcactcatggtaattagaaactctgattggcagctttgtatttcttgactaaaaacctaaataaactgattaggttttaggcgttctttcaaagaggttcttgagaagattgagaactatcctatttggtgcttagtgaaaagattttgaattactgtacgtaccagttgttgccatttctttattaaattcagaagtttttttgccaaataacaatttt

SEQ ID NO: 12883 - DNA, 1986 bp, Homo sapiens
ctcaaaaaagaaaaaggagatgttgaatgggaagtcagcaagggtgctagaatgtagcaagtattcttcaggtgttagtgatttctgttgttcgggaagaggagggttatggaggaagagtatgggatttaggtgggttaagtgatttgcccaaagtcaagaggttagtctttaacctttggcagaagcaggatttgaagtgagttttcacacccctcttccctggtcagtgtgttgataacagcccacccacctgtggttccagggtgttcttaagaagccaaggttgtcttgggtgtggtagctctttgaaaggtagaaagttccaccaagaaggccttttttcttgaatactgcttagcttccttgtcaggctccaagatgcagattgcctgtgggctatctctctccacagataaacctactcacatcttcaggacagccttttttttttgagacaggagtcttgctctgttgcccaggctgtagtgcagtggcacaacggggtcccacaggcaagtgctggggaaaggcccacccagccatcaggtagcctgtgtgttctacaaacagcagctggcagcactgtctcctgccggacattcctgccacccgacatcaaagctggtgggtgaccttttcagccatttgacattcctcccagaagaacctctgcctcccagaggtttaagcagttctcctgcctcagcctcccaagtagctgggctatttttttttttttttttttgagatggagtcttgctctgtcgcccggttagagtgcagtggtgcaatctcggctcactgcaacctctgcctcccgggttcaagtaattttcctacgtcagcctcccgagtagctgtcaggtgcacaccactacacccagataattttgtatttttagtagagatggggtttcaccatgttggtcaggatggtctcaatctgacctcgtgatccgcctgcctctgcctcccaaagggctgggattacaggcatgagccaccgcgcccagccttaatttttgtatttttaatggagatggggttttgccatgttggccaggctggtcttgaactcctgacctcaagtgatctgtccgcctcagcctcccaaagtactgagattacaggcatgagccaccgtgcccagcccatcttcatcttctttacttgaacttaattctttttcatgcatcttcccttctttcctcttttctcctccacccaaatgtcttaactgttaacattcccaggtgtttggtcctgggcctctggaggttgtgaaggagcactgctcagtcctcccttcaagaaagcagcttcaaggagttcaattacaaaagctcctggcattggggacctgccgccatgttcctgcccagggcatgctggtcctggctgtcaccaagcacagtggaggtcaggtgctaggccatttctgcccgacacaggcctcctctaatgagcagtctgaggccaggcacaggaggctgaggcaggagaatcgcttgaacccaggaggtggacgttgcagtgagccgagatcgagccactgcactccagcctgggtgacagagtaagacttcgtctcaaaaaataaaaaataaaaaaatactgagcagtctgcttgggcgcttccatcagcctggccatgacatctttggagctgtcctgccctcttttgccccggtgttccttggcccacctgtcagacctacatcataggctcttcctgtcttctgtttcctctcccctttctctaacataggtgtttctcctgagaaagaaaaaaaccacctgtccctgacattcagaagctgacaacactgttcggtcatgccattctcctgttggacataaacagtctctgaatgccaaccccaaagttgctctcaggccatgataaaataaaccacttaataattttgtctaagcacgtacaaagaaaattcaaggtcagtttaccactcacaaaataccaaa

SEQ ID NO: 12884 - DNA, 593 bp, Homo sapiens
ggctgaagtagggggattgtttgagcccgggaggtcgagccctgatcatgacactgcactccggccagggcgacagaacgagaccctgagaaaaaagaaaagaaagaaaaaaaaagattagcatagtgactttctctttgatgtaaccataaatatttaaagacatcagtgccgggcacattgggaacctcaacaaagttgtttccgttatccatctccgaccagaattcaggaagaactttgcctgtcttgttcccgctataaccaatgactcaacaaatgtttgtggagtgagtgggtgaccctctccttttaccaacggtaaacagcccgcggaaagaaaaagtgacttagccaaagtctctccaggcatttggggcagagtcgggactagcatagtagtatcctgactctcgcaggagggctcgctccactgtagttattaattctcctctccacacaaccaggtctaatccggccaaagtcttcaattcttaagctaagaaaaaaggaaaatacatgtaaactctgttttgcgatagacaagaaaacagaagaattaaaaatcctccttccggggtgcaccagaatcc

SEQ ID NO: 12885 - DNA, 13814 bp, Homo sapiens
gcggccgctcgagcccctgcctgagcacagcctctcagatgagcagtgtctccatggcgagtgggagcgtgaagatgaccagctttgcggagaggaagctccagagactcaacagctgtgagaccaagtccagcaccagcagctcccagaagaccacgccagatgcgtctgagagctgcccagcccctctgacgacgtggaggcagaagagggagcagagtccgagccagcatggcaaggatcccgccagcctcctggcatctgagctggtacagctgcacatgcagctggaggagaagcgcagggccatcgaggcccagaagaagaagatggaggcgctgtcggcaaggcagcgcctgaagctcggcaaggctgcattcctgcatgtggtgaagaagggcaaggccgaggctgccccacccctcaggccggagcactttgcaaaggagtactctcagcacaacggggaggactgtggggacgctgtttccaaaaccgaagactttctcgtgaaggaggagcagagagaggagctccttcacgagccacaggatgtggacaaagagagcctggcctttgctcagcaacataaagcaaaagaccctgtggctctgcacgagctggagagaaataaggtgatctccgctgccctcctggaggacactgttggggaggttgtcgacgtgaatgaatgtgacctttccatcgagaagcttaacgaaaccatcagtacgctgcagcaggccatcctgaaaatctctcagcagcaagagcagcttctgatgaagtcccccacagtcccagtgccaggctctaagaataactcgcaggaccacaaagtgaaggcaccagtccacttcgtggagccactctctcccacgggcgtggctggccaccgcaaagccccccggctgggtcaaggccggaattcccgttccggaaggccggcggagctgaaggtcccaaaagacaggccacagggctcctcccgaagtaaaaccccaacgcccagtgtagagacgctcccgcacttgagacccttccctgccagcagccaccctcggacgcccacggaccctggcctggacagtgccctggagcccagtggtgacccacatgggaagtgtctcttcgacagttacaggctccatgatgaaagcaatcagcggacacttactctgtcctcttccaaagatgccaacattctttcggagcagatgagcctcaaagaagttctggatgcgagtgtgaaggaggtggggtccagctcctcagatgtctcgggaaaagagagcgtccccgtggaggagcctctgaggagcagggccagcctcattgaagtggacctctccgacctgaaggcccccgacgaggatggggagctggtaagcctcgatggctcggcggaccttgtcagcgaaggcgaccagaagccgggggtcggcttcttcttcaaggtaagggattggtagcatctgtttcaggcactcgtgatgtgttgccaccccacgtgatagtgagttagagaacacagatctgcaccaggctggccagccgctcctgtaagaggccaggggatgtgtgtgtttagctttgtgggccacagagtctctgtcccgaggactccacttggccagaagcagtcccgggcaatacgcatgcaagtgagcgtggtgtggctgagacgactttgttatgagccctgaaactggaatttcatgtgattttcaacatagtttttttttttttgctggttttccagtcaaaaccctgtcatctccctgtcctgccccaaagcgtaaaaagcgttcgtcgttagaatgctctggaggtggccaggcctggcctgtgggctgaagtttgccaacctctgatatagcaacttcaaaaaacattttttgtatgtttttcttgtaattttttccttagatatgaagggaagcgtaaactgaactgttttaatagtcagtgcgtcacatgatgtttgctgtgacgttcgttgtctcctaagatgataagaccatatatcgtcgtctcctaagatgataagaccatgttttcgtggtagtttttcaatgtttagatagattttgatacacagttacttacagtattgggtacagtaatgtgctgtgcaggtctgtagtctaggagcagtggctgatgtagccgaggcctgtggggggcgctgccatccaggtgtgcgcacactccgtcatgctcacacagcagcagagtcacctgaggacctatttctcagaacgttttctctcggcaagcgacacgcaactgtttctgctttgcctccaggcagttatgaatttgagaggataccaaatcatcaggtggatcttagcaaaagaggcaagctttatttggtggttgcacttttgaaatgtaaacaaattcgtgaccaacttcagtattcactttttcgcttttttttttttggacagagtctggctctgtcgcccaggctggagtaaaagggcatgatcttggctcactgcaacctctgcctcccgagttcaagcgattcttctgcctcaggctcctgagtagctgggattacaggcgtgtgccaccatgcccggctaatttttttttttttttttttttttttaagtggagacagggtttcgccatgtcggccaggctggtcttgaactcctgacctcaggtgatccactctccttggcctcccaaagtgctaggattacaggcgtgagccaccacatctagccaatttttgtatttttaatagagacagggtttcgccatgttgggcaggctggtcttgaactcctgacctcaagtgattcacccacctcagcctcccaaagtgctgggattacaggaatgagccattctgcccagcctcgctcttattttggaaatatacgtgtactttttaaggcaaactggatctcgtgagatgtttgggaaattgggtgatgccgagcgcctttgaaatgccctggtttgtcttcattcgtatttcagagtctgtaacggttagagaaaagcatagaagtctttatgcgttaaacttttaaaagcgtagtggaagtcggctgctgggtcgagtgcggccgtgtccggcgtctgagggggttcctgtcatgctctgtgtggcctctgtcttgcaggatgaacagaaagcggaagatgagctcgccaagaagcgggcggccttcctcctgaagcagcagcgcaaggccgaggaggcccgcgtgcgcaagcagcagctggaagcggaggtggagctcaagcgtgacgaagcccggtaagcgtcccgccgggggggaaagcagactgagcaggagcctggtgggtccctggcggccccggtcccgttgctggcactgagcatggaccatggcaatgagtgcctgtgacggtcttactcctcccatggaccacctccccgaactttcacggcccctgctgatcttcagtgaggacgtgcgttgccggtggccagggaggctgtgtggcctcggtgggtcatctgcaggactgcctttgcagcctctgtgtcccgcttgtggaggctggccactcttggtcccagcggccggggagaacccgagaaacgcgcctggacagagcgccgcggcgcaggcgtcgtggaagaagccccgtgaccgagcagtgtctgggcgtgtgtttctctcaggcgcaaagctgaggaagaccgggtgcggaaggaggaggagaaggcgcggcgcgagctcatcaagcaggagtacctgcggaggaagcagcagcagatcctagaggagcaggggctcggcaagcccaagtcaaagccgaagaagccgcggccgaagtcggtgcaccgggaagagtcgtgcagcgactccggcaccaagtgctcctccacccgtaagcagccccggccctcacgcgggcagcgcttccttccgcgggcggcggcctcacgttcttcagctcatttcaattttgtcatcaagagtggtgtgaggcgggaagggtggagatgattatccccgtttcatggatgacaatgttgagaccagatgctctgagatgtgcggcacatccaggcgcagcccggctccccgggatggggtggggacgcggcctgtgtggccgagctctgcagggcgaggtgaggggaacaggtacaggggacaggtacttgtctgtcggaatccgttcatgaaccgtcgtctgtttctgtctctggcagctgataacttgagccggactcagtcaggctccagcctgtccttggcctctgcggcgacgacagaacccgagagcgttcattccgggggcacaccctctcagcggtaaggggcctgagacggccgccggcacggggctggaggacgttcggaggggcagggtgggacttcctgattaaacacggtgagagaggcttttgtaactttaattttgatataatttcacatttacagaatagttgcaatcatgtcatcaggaataccagtgcccttcacacgggctccccagctggttaaacgtggcagccttcaccttatcaccctcccctgtcccccaccccacacgtgcacacctgcttcttcatcgttttgagtccgttggagtccaagcgtggtggctcacacccatgattccaggactttgggaggctgaggcaggaggatcacttgggccttggagttccagaccagcctgggcaacagagtgagacccccccatctctacaaaaaatacaaaaaaaagttagctgggtgtgggggcatgcacctatagtcccagctacttgggaggctgaggtggtagtatcgcttgagcccaggaagttgaggctgcagtgagctgtgctcaggctactgcactccagcctgggcaacagagtgagacgctgccagaaaacccccaaaagcaaaaataaacagaaaaaaaccactccgttggagatgtctggccttttatgcttaaatacttaagtgtgtatttcctagaacgagaatgttttctcgtgttaccagttaccaaggcagcactttcatccgatttgcggtccccattcagctgtcctcagttatcccaagagtgtccctgacaactgtgttgtttccgagtccaggatctggtttggggcgatgaatggccttgaaatgccatgtccctgtagtctccttcgatccagagcagttccttagcctttctgtgtttttctggaccttgacttttggtaaccacaggtcagttatccttctggctgcctctcagtatcggcttcctgtgatgagactgaggcctcgcgctgctgattgagcagcccagaagtgagtgtgcgtctttctcaacgcagcctctcaggtgggccccgggaccgctcctgtgatgagaaagtaacttcaggagagaggctggggactggtctggacctcacggaactgtcccgcaggggctttagtgaccaccatggagctcctgctcaccgcttcctccacgcgtgttgtcagctctcgtgggagcaagggcttcccttgcccatgtgtccctttatttttatatgcacagcgtgtggctcctgctctgtgtgcacctgtgggccgtgttttcttgtctcttcacccgtctcatggctccttgttgtctctgggctttgtggcagatccctccgagggactgcagattctgtttgggtttttgttctggtggtcagttaccctggctggattcagactccagctctgtctgcctcccttgtgagagcagcagccgacatctctgagcagctgtgtccagcctttcggcatctgttgtgctcagtggagacttccctgcagggtggagctcaggccttccagggatcagcgtcactgggacccaagttttcagactcggcctgctgtggcccctccttccctaggtctcatccctggctgggcagcagcacaggtggcccaaacttcatcctctggcttcctgagccagcagcactgtgccctgtgctgtgcctgtgccctgctcacgggggcagtgcctggagcaagggcttcgtggaggtgaaccccttcggtgaagggctgactcccctctgtctgtcttcatcactccctagtgcctgaagtgtttgcttttgtattttgctcggagtgtctgtactgtgtgggagttgtggcaactcgagcccccaccgtcaccgaaagcctcctcccctgctgatgtgcttcctgtcctggttgcgggccagccccttgccagcagtggtgagaggaagccagcgcttcacctgcctgtctcttgtctgtttctgcctgcagagtggaatcgatggaagccctgcccatactgagccgtaacccaagcaggagcacagaccgagactgggagaccgcgtcggcggcatcttccctggcctcagtggccgagtacacaggtgacggcgttcgccctccttagaggtcatcgtgggcatggccatacgcctttgcgtggctctttcaatatctgttctctattttggtctaaaaagtatttttctaacaaagatgtttgatgtagtgaaagagagctaatttgagctctttggtgctgaaatgggcatgtggtttagtagaagctcttaggcctgccttgccctcctggtcatctgccctgctgtctgctgtgcagggggcagcggacctgggggcagcagagcccgggagtggtggaagtgcttggctctcaccagctgcccttggagcaggcgtgggctcagggcacagtgaactggaggtgctgctgtggctgaggtgtatgtcccggggcctttgaactttagactttttacaagttatttacctggttttgtcttttttttatagttaagacactgaatttagaaaggggataaattattgattactttgtctttagttgtctaaaaatttataacttaaaattcttttgaataaatttaagtggtttttacttcccatttttaaataatcataaatatctgtaattcagcctacccattgcttgcttctaagacattgctggttttcttttttgtgtgtgttcgtgccttaaaataataattttaccaaccctggcctcgtttcttaggtcccaagctctttaaggagcccagtagtaaatcaaacaagccgattattcacaatgccatatcccattgctgcctggctggaaaagtgaacgaaccccacaagaattccatattggaggcaagtatcatgtttcaacctcagtttttatgtggaataaaaagtgtttataaattaagggttctttttaaaagaaaacacccctaatctttgatgcatgagagttactagggagaatgcagatttcaaggaagaggccgttccaggcaggtgggagtgaggagtgccaaggtccaggggctgcagtgagcctgtgctggaggaacacccaggaggacggggcagggttcagaggctacatcctcatgtggtgcctctgggctgaggaaagacatagttctactcagtgagatagtggatgcaggtgtgggcagaggagagccaggaacccacctgcccttcccagtagatcagagcagtcagcagggaagccagggaggcagcctggaggtgaatgaggaacaggggccagggctggagcggtgggttggggaggaccgaggacggaggacggagtggtgggttggggaagatggagtggggagggagggaagaggcgcgcacccgctgagcgtgtggactccggagcacccagtgtgcatgcccagggaggggcttggaagcaggaatctgagggtcctgcacggggtctaggctggcccctgaggggcaggactgggattccaggggagaggaggcagagccactggaccctgccccagattgaggctggtgtgtggccttaagttgctggccttgggatacaacggcttgtgaatgagtgaatgaaaattatgcaacaatctgtcatccaccagaaattctgctttttaataattaagactaacccctggtccttagttggtttagttgtaaaaattaaagtgacatacggaatttctgacccactttaaaacggatgtgttcttttcttgatagtgaagatcatctagactaagaatggccccgacctaggcaggtctcgtggcactggggacagaagaggccatggtcatgcccttcctgcttagatttccacacggagaggtggttggccccctgtatcagtggcccccaggatcaccctgcatgcggagatgcactggaaggactcgtggccctcagtgtggagtcgacccagggcttagatttattccagcactgtggagggagccacagccactgggtgaagagggagaagacagaggcggggctaggccttgtgcagctccctctgctctcgttcttccagcagtggatccacagcagcctgtgggccatggaaagcccttttgagactggatgccctgagctctccttgggggctggtcacaaggcacactccctgcccagtgtgcagcagtgtgcctgacgcctgggaggaaaccagcgtcagcgtgcagaccagcagttcaggctcaggaggccctcctgtcttgccagtgagtgactgggagcgagctctgcagatagcaagttcccaggtgcccaccaagggccgcccagcaggcaggcctttctaggacagcagccctctcagctgtgccacataagctgtgggcaccacacgcttccttatcgtgcaggcagcaataagtaaataagatgaaccccactccccacagtcccgctgtcgctacaaattaaatgtttctttctttttggcatctaattctgttcatatttaaacacagtgagtagggttgaaatcagtattatatagacagttttggattcttttaaaaaatacgtattatttaaaataataaaccccattatatgctgatacattgcatatttatgaaaagtaacttttctaaagccaaataaatagaagagtggcattgacataagagggctggcatctcagccgctcgggccctccgtccattacaaccacacagcccagggccttgggaaggttctgccgcacacttgggagaggcgatgaggccttagcctttcgaggtcgagggcttgaccctgagattcctgggaaggcctcaggatgcctgggccgcatgtggagaactgtgagggcagacccaggtgcactcccattcccaggcgtgtggagggtttgtttttaaaagttaccaaaacacttgaagatacgttttaaactttaaaatacaatcaacaaacgcggcgacaggcatcagcagtttgtcatacttcagattcttcttttttttttttttgagatggagtctcactctgtcgcccagactggagtacagtggtgcaatctcagctcactgcaacctccacccctccagactcaagcgattctctgagtagctcggactacaggcatgtgccaccacgcctggctaatttttgtatccttagtagagatggggtttcaccatattggccaggctggtcttgaactcctgacctcaagtgattcgcccacctcagcttcccaaagtgttgggattacaggcgtgagccacagcgcccggcccaaacagctttatgagatatcattcacataccgtaaaattcacccttttaagttataccattcagtggtttttagtacattaatagagtagcacaaccatcaccaccgcctaatttcagagcattttcatcctcataaaaagaaactccacgcccgtgaacagtcacccccctaagtcttcccgcgcccaagctcttggcggtcgccagtctgtctccatggatttgcctgttctgggcatttacataactggcatcataattatatggccttttgggtcaggcttctttcacttagcgtgatgctctgaggtttctcagtgtagtgtgtaccggacctccattcctttttgtagctgggtaatgctccattgcatgctccgaccccatgctgttcatctcgtcatctgctgatgcacacttgggttgattcttcttcaaacattttttattgatagggaacagatgtgcatgcttttgggggtacatgtgatattttcgtttctactttttgcctgtgaagggatagtgctgttatttatatgcagtgttttgtatggatgcgtgttttcatttcccttgagtacatatgtgagagaggaattgctgggtcccacggtaactgcctgatggtttggagaagagccaagttgtttttcacagcagctgctgtgctctgtatccttctggcagtgaaagagccccatggctcgccagcactcgttaccgccctgcttctgggttccagccgtccttgtgggcatgacgcgacgtctctttctgactggcatttctctggtggctgatgatgagcatcttttcatatgcttttccatttaatcgtaaaagcattcttttcccccttgcttgcttagacttcttaagtaaagtctcaatggcatataatgctcccgtacaggggtctgctgtaattgtttacaacaggcaggccgtagctgacgggtgggagagcttcccacggagcggtgctggttgagccgctgtgggagcccaactcgtggcaattggagtggccctgaagtgtttgtctcttccccttttctctctctgcacaggagctggagaagtgtgatgccaatcactacatcatactgtttcgtgatgctggctgccagttcagggcgctttactgctactatcctgatactgaggaaatctacaaactcactggcacggggccaaagaacatcaccaagaaaatgatcgacaaactgtataaatacagctcagaccgaaaacagtttaacttgatcccagccaaaaccatgtctgtcagtgtggacgcactcacaatccacaaccacctgtggcagcccaagcggcctgcagtgccaaagaaggcccagactcgtaaatgaccccggtgcagctggcgtccaaagggtgacccagactcgtaaatgatgcccttgtggctggcatccagagggtgccacggggtccttatttattgttttcatctatttgggtacgaagtgtgcaaagtcacagaccttttgcaaagaggtttctagacagcagaagaaaacccctctctcagcgctcatctcacgcagaggatgccaggcagggtgaggatgggggagtagatgccgcttttgcagtggctcgcactgctgtggccactgctgaccactgaggctcccagcggagggtgttcacagccaggtcccgggccacggagctcccttacttgaagttctccttcagcatagattagacgtgatccactttgctttcttgcttctcacctcgcccccttgcacattgcctgacaccctcatattggccagctgtaatctcgtgactatgggactgaggctcaatcttggcttggggtgtttgaatgtctatagcaaaggaattcataatgggaaatctttttcatttgagaaattgtatgatatttattggttgtgtctactgccaacatttatatccaattctaagatttctgaaaaaaaattcttatcccttgctgctcagaaaaagtttacggaaaacaccagttcactaaaagcaccgaaatctgcaaagcctgtcttccgctagaacaacgtctacaaatgtgaagatgatgacttctggcacgcggtcatgagggtggggaatggcactaggagctgatgtttgcctcatttaaagtaggcaagccgagccaactgcagccatcattcattaagttttgggtagtgctctaatggtttgttcactttaataaagacagattttggtaaagtagaatatttttcattctgagcatgtttgtcccaaaaggtgatgcacttaagctgacagtcccttcagtggttttgttaggtcacggcttgtcctgtctggattctgcatctggaagcgctgcatgctctcagaggagcgtgccgtttcccctgtagatggatacttttgttttgttgcctatttaaaaacaattaagtggttatttgcagttatttcagaactccaagtaagtggatggctttgggttctttctgccttggtcccaatggtgttgatgcttctgtggagcgcggacattcccaggagcaggtgcgtgccagccatggctgccagacactgctgcaactgaccagctgccggaagattctggagccactaacattagttttgcacatattttcttgggagtgttacttgaatctatctcaaactgcagaaaaaatcaaaagatcaataattgggagaaaaagagacaaatttaactgttacataattttagatagacaaaaaacatgagtgagtcgtgtacataaggagggaacatggtacagaaggctagaaggaattataggtcttattcccctttcctcagtcctttgaagagaagtacagtctcttgcgattttgtatatatcgtgttcgacacagccgctctctgtcctgtaaatagggaactaaaggctgtatgatttctcaagtgctgagttacacagtcctgagtgagctttctgttaccatactttcacacgtgggctttatttctcactgtatgtttgatatgatattactgtatttattttaagaaagcactaagatgtaataaagtgatgaactaatttgctttacattgaatcgtatgtgtgaggttgctgtggctcatttcgctgaccaggcgacaccaactccttgctttataggagtttcacattgttctttaccatggccctatcgaagtcagtggaattggattctttttaatgaagagctagaaaatatctggcatagagctggaaaattgcattcccatgggacgtctgaatcaattctggattttctccatggaatgagtcagtgtgtggaacatcctgaaacttgtccttaagcgtgtagttttcactgttcgttgcgagtaagcactaatgtggcatggacattcctgatgtcccaagtccccaggccagtgttcgcctaatgattgacagaagcgtccctgcgttcttcatgcttggacacagcaacccttttaattagtcttgaaaagtttcagacacaggattaattttcgtggtggtgcttttgggcctttctggcttgggtggtggtaaagtcatgattttgcagttgataacactgacttataactctgtttatcaatgtctcctatattcaaagcccctgcagtggtatttgtgtctcgttgcaaatttctttcagcggaaagcttgcacaactttcgttgtgtctcagaattctaaccttgttatttaagacaagctgctctacccatttaggatataactttgtaaagaaagtgtaaaccaaatgattcaatgtatgatgaagtttatgtgtaaatccttggtaatgctagaattctgggagcccagaagggttgaaagagaaatgaaacttgcgtgagtcccattattttacgcatgtatgtgcagatacgttctacccacacgtgtgcgtgcacatggctgtgtgcgtgcaccaaagatggactgctttccatgtgtccttttgactttctgcacgtgtcactgcggtgcagtctcttagcagacttcaggcccaaactgtattcttcactcaggcaaaattgaaaagtggaataattctaaattacttctaggttatacttttacctccctgaaattgtagttgtcacttggagggcaaaatatttattgaaataaaattttctgttaaaaattcatcact

SEQ ID NO: 12886 - DNA, 7525 bp, Homo sapiens
gagtggaatcgatggaagccctgcccatactgagccgtaacccaagcaggagcacagaccgagactgggagaccgcgtcggcggcatcttccctggcctcagtggccgagtacacaggtgacggcgttcgccctccttagaggtcatcgtgggcatggccatacgcctttgcgtggctctttcaatatctgttctctattttggtctaaaaagtatttttctaacaaagatgtttgatgtagtgaaagagagctaatttgagctctttggtgctgaaatgggcatgtggtttagtagaagctcttaggcctgccttgccctcctggtcatctgccctgctgtctgctgtgcagggggcagcggacctgggggcagcagagcccgggagtggtggaagtgcttggctctcaccagctgcccttggagcaggcgtgggctcagggcacagtgaactggaggtgctgctgtggctgaggtgtatgtcccggggcctttgaactttagactttttacaagttatttacctggttttgtcttttttttatagttaagacactgaatttagaaaggggataaattattgattactttgtctttagttgtctaaaaatttataacttaaaattcttttgaataaatttaagtggtttttacttcccatttttaaataatcataaatatctgtaattcagcctacccattgcttgcttctaagacattgctggttttcttttttgtgtgtgttcgtgccttaaaataataattttaccaaccctggcctcgtttcttaggtcccaagctctttaaggagcccagtagtaaatcaaacaagccgattattcacaatgccatatcccattgctgcctggctggaaaagtgaacgaaccccacaagaattccatattggaggcaagtatcatgtttcaacctcagtttttatgtggaataaaaagtgtttataaattaagggttctttttaaaagaaaacacccctaatctttgatgcatgagagttactagggagaatgcagatttcaaggaagaggccgttccaggcaggtgggagtgaggagtgccaaggtccaggggctgcagtgagcctgtgctggaggaacacccaggaggacggggcagggttcagaggctacatcctcatgtggtgcctctgggctgaggaaagacatagttctactcagtgagatagtggatgcaggtgtgggcagaggagagccaggaacccacctgcccttcccagtagatcagagcagtcagcagggaagccagggaggcagcctggaggtgaatgaggaacaggggccagggctggagcggtgggttggggaggaccgaggacggaggacggagtggtgggttggggaagatggagtggggagggagggaagaggcgcgcacccgctgagcgtgtggactccggagcacccagtgtgcatgcccagggaggggcttggaagcaggaatctgagggtcctgcacggggtctaggctggcccctgaggggcaggactgggattccaggggagaggaggcagagccactggaccctgccccagattgaggctggtgtgtggccttaagttgctggccttgggatacaacggcttgtgaatgagtgaatgaaaattatgcaacaatctgtcatccaccagaaattctgctttttaataattaagactaacccctggtccttagttggtttagttgtaaaaattaaagtgacatacggaatttctgacccactttaaaacggatgtgttcttttcttgatagtgaagatcatctagactaagaatggccccgacctaggcaggtctcgtggcactggggacagaagaggccatggtcatgcccttcctgcttagatttccacacggagaggtggttggccccctgtatcagtggcccccaggatcaccctgcatgcggagatgcactggaaggactcgtggccctcagtgtggagtcgacccagggcttagatttattccagcactgtggagggagccacagccactgggtgaagagggagaagacagaggcggggctaggccttgtgcagctccctctgctctcgttcttccagcagtggatccacagcagcctgtgggccatggaaagcccttttgagactggatgccctgagctctccttgggggctggtcacaaggcacactccctgcccagtgtgcagcagtgtgcctgacgcctgggaggaaaccagcgtcagcgtgcagaccagcagttcaggctcaggaggccctcctgtcttgccagtgagtgactgggagcgagctctgcagatagcaagttcccaggtgcccaccaagggccgcccagcaggcaggcctttctaggacagcagccctctcagctgtgccacataagctgtgggcaccacacgcttccttatcgtgcaggcagcaataagtaaataagatgaaccccactccccacagtcccgctgtcgctacaaattaaatgtttctttctttttggcatctaattctgttcatatttaaacacagtgagtagggttgaaatcagtattatatagacagttttggattcttttaaaaaatacgtattatttaaaataataaaccccattatatgctgatacattgcatatttatgaaaagtaacttttctaaagccaaataaatagaagagtggcattgacataagagggctggcatctcagccgctcgggccctccgtccattacaaccacacagcccagggccttgggaaggttctgccgcacacttgggagaggcgatgaggccttagcctttcgaggtcgagggcttgaccctgagattcctgggaaggcctcaggatgcctgggccgcatgtggagaactgtgagggcagacccaggtgcactcccattcccaggcgtgtggagggtttgtttttaaaagttaccaaaacacttgaagatacgttttaaactttaaaatacaatcaacaaacgcggcgacaggcatcagcagtttgtcatacttcagattcttcttttttttttttttgagatggagtctcactctgtcgcccagactggagtacagtggtgcaatctcagctcactgcaacctccacccctccagactcaagcgattctctgagtagctcggactacaggcatgtgccaccacgcctggctaatttttgtatccttagtagagatggggtttcaccatattggccaggctggtcttgaactcctgacctcaagtgattcgcccacctcagcttcccaaagtgttgggattacaggcgtgagccacagcgcccggcccaaacagctttatgagatatcattcacataccgtaaaattcacccttttaagttataccattcagtggtttttagtacattaatagagtagcacaaccatcaccaccgcctaatttcagagcattttcatcctcataaaaagaaactccacgcccgtgaacagtcacccccctaagtcttcccgcgcccaagctcttggcggtcgccagtctgtctccatggatttgcctgttctgggcatttacataactggcatcataattatatggccttttgggtcaggcttctttcacttagcgtgatgctctgaggtttctcagtgtagtgtgtaccggacctccattcctttttgtagctgggtaatgctccattgcatgctccgaccccatgctgttcatctcgtcatctgctgatgcacacttgggttgattcttcttcaaacattttttattgatagggaacagatgtgcatgcttttgggggtacatgtgatattttcgtttctactttttgcctgtgaagggatagtgctgttatttatatgcagtgttttgtatggatgcgtgttttcatttcccttgagtacatatgtgagagaggaattgctgggtcccacggtaactgcctgatggtttggagaagagccaagttgtttttcacagcagctgctgtgctctgtatccttctggcagtgaaagagccccatggctcgccagcactcgttaccgccctgcttctgggttccagccgtccttgtgggcatgacgcgacgtctctttctgactggcatttctctggtggctgatgatgagcatcttttcatatgcttttccatttaatcgtaaaagcattcttttcccccttgcttgcttagacttcttaagtaaagtctcaatggcatataatgctcccgtacaggggtctgctgtaattgtttacaacaggcaggccgtagctgacgggtgggagagcttcccacggagcggtgctggttgagccgctgtgggagcccaactcgtggcaattggagtggccctgaagtgtttgtctcttccccttttctctctctgcacaggagctggagaagtgtgatgccaatcactacatcatactgtttcgtgatgctggctgccagttcagggcgctttactgctactatcctgatactgaggaaatctacaaactcactggcacggggccaaagaacatcaccaagaaaatgatcgacaaactgtataaatacagctcagaccgaaaacagtttaacttgatcccagccaaaaccatgtctgtcagtgtggacgcactcacaatccacaaccacctgtggcagcccaagcggcctgcagtgccaaagaaggcccagactcgtaaatgaccccggtgcagctggcgtccaaagggtgacccagactcgtaaatgatgcccttgtggctggcatccagagggtgccacggggtccttatttattgttttcatctatttgggtacgaagtgtgcaaagtcacagaccttttgcaaagaggtttctagacagcagaagaaaacccctctctcagcgctcatctcacgcagaggatgccaggcagggtgaggatgggggagtagatgccgcttttgcagtggctcgcactgctgtggccactgctgaccactgaggctcccagcggagggtgttcacagccaggtcccgggccacggagctcccttacttgaagttctccttcagcatagattagacgtgatccactttgctttcttgcttctcacctcgcccccttgcacattgcctgacaccctcatattggccagctgtaatctcgtgactatgggactgaggctcaatcttggcttggggtgtttgaatgtctatagcaaaggaattcataatgggaaatctttttcatttgagaaattgtatgatatttattggttgtgtctactgccaacatttatatccaattctaagatttctgaaaaaaaattcttatcccttgctgctcagaaaaagtttacggaaaacaccagttcactaaaagcaccgaaatctgcaaagcctgtcttccgctagaacaacgtctacaaatgtgaagatgatgacttctggcacgcggtcatgagggtggggaatggcactaggagctgatgtttgcctcatttaaagtaggcaagccgagccaactgcagccatcattcattaagttttgggtagtgctctaatggtttgttcactttaataaagacagattttggtaaagtagaatatttttcattctgagcatgtttgtcccaaaaggtgatgcacttaagctgacagtcccttcagtggttttgttaggtcacggcttgtcctgtctggattctgcatctggaagcgctgcatgctctcagaggagcgtgccgtttcccctgtagatggatacttttgttttgttgcctatttaaaaacaattaagtggttatttgcagttatttcagaactccaagtaagtggatggctttgggttctttctgccttggtcccaatggtgttgatgcttctgtggagcgcggacattcccaggagcaggtgcgtgccagccatggctgccagacactgctgcaactgaccagctgccggaagattctggagccactaacattagttttgcacatattttcttgggagtgttacttgaatctatctcaaactgcagaaaaaatcaaaagatcaataattgggagaaaaagagacaaatttaactgttacataattttagatagacaaaaaacatgagtgagtcgtgtacataaggagggaacatggtacagaaggctagaaggaattataggtcttattcccctttcctcagtcctttgaagagaagtacagtctcttgcgattttgtatatatcgtgttcgacacagccgctctctgtcctgtaaatagggaactaaaggctgtatgatttctcaagtgctgagttacacagtcctgagtgagctttctgttaccatactttcacacgtgggctttatttctcactgtatgtttgatatgatattactgtatttattttaagaaagcactaagatgtaataaagtgatgaactaatttgctttacattgaatcgtatgtgtgaggttgctgtggctcatttcgctgaccaggcgacaccaactccttgctttataggagtttcacattgttctttaccatggccctatcgaagtcagtggaattggattctttttaatgaagagctagaaaatatctggcatagagctggaaaattgcattcccatgggacgtctgaatcaattctggattttctccatggaatgagtcagtgtgtggaacatcctgaaacttgtccttaagcgtgtagttttcactgttcgttgcgagtaagcactaatgtggcatggacattcctgatgtcccaagtccccaggccagtgttcgcctaatgattgacagaagcgtccctgcgttcttcatgcttggacacagcaacccttttaattagtcttgaaaagtttcagacacaggattaattttcgtggtggtgcttttgggcctttctggcttgggtggtggtaaagtcatgattttgcagttgataacactgacttataactctgtttatcaatgtctcctatattcaaagcccctgcagtggtatttgtgtctcgttgcaaatttctttcagcggaaagcttgcacaactttcgttgtgtctcagaattctaaccttgttatttaagacaagctgctctacccatttaggatataactttgtaaagaaagtgtaaaccaaatgattcaatgtatgatgaagtttatgtgtaaatccttggtaatgctagaattctgggagcccagaagggttgaaagagaaatgaaacttgcgtgagtcccattattttacgcatgtatgtgcagatacgttctacccacacgtgtgcgtgcacatggctgtgtgcgtgcaccaaagatggactgctttccatgtgtccttttgactttctgcacgtgtcactgcggtgcagtctcttagcagacttcaggcccaaactgtattcttcactcaggcaaaattgaaaagtggaataattctaaattacttctaggttatacttttacctccctgaaattgtagttgtcacttggagggcaaaatatttattgaaataaaattttctgttaaaaattcatcact

SEQ ID NO: 12887 - DNA, 493 bp, Homo sapiens
gaagggagaccgaggagcatcgtgtctaggaggcccagcgagggcccccagcctttggtacgaaggaaaatgactggcagtcgcgacttgaataggacttttaccccgattccatgctcagaattccccatgggcatcgaccccaccgagacaggaccactgtcagtggaaaccgcaggagaggtctgtggtgggcctctggcccttggcggattcgatccgttcccccagggaccatccacggatggcttcttccttcatgtaggcagggccgatgaagacaccgagggaaggttatatgttagttgttcaaaaagccccaactcccacgattcagagccgtggactctcctcaggcaggattctgactcggatgtggtggacatagaggaagccgagcacgatttcatgggtgaggcccatcctgtggttttcagcagatacattggggaggaagagtcggccaaactgcaggaggacatgaaggtgaagg

SEQ ID NO: 12888 - DNA, 121 bp, Homo sapiens
cgcctgtggtcccagctactcaggaggctggggcaggagaatcacttgaacctgggaggcggaggttgcagtgagccgagatcgcgccactacactccagcctgggtgacagagcgagact

SEQ ID NO: 12889 - DNA, 5476 bp, Homo sapiens
agatggcggcgcctgaggggtcttgggggctctaggccggccacctactggtttgcagcggagacgacgcatggggcctgcgcaataggagtacgctgcctgggaggcgtgactagaagcggaagtagttgtgggcgcctttgcaaccgcctgggacgccgccgagtggtctgtgcaggttcgcgggtcgctggcgggggtcgtgagggagtgcgccgggagcggagatatggtaagtagcgggtccagggaggggttcggcggtggaggtcggtcggttggcaacagtggggtctgtcggccgactcaggggtctgtggtgagccataaccggagtctgtggactgaacggcgggagtctatgggcagaatgatgaaccatctgggagttctatggtgagccacggtggggggctccttaatagaagtttagtggggactccgtgtggcagttccgtgggaaaccatgatcgggggttcttagggcagagggataagcgggttgtaaggagtcacattgagtggtctgtagtgagccgtgacgaggagtccgtgtccgggtatccgtggacagccgcgactgggggtgggtgcgggtgccaggtgggtctatgagataaacagggaggggtgcgtggagaaccgcgatgggaagtccgcagtgagttacgcggggtctgtgaggcgccacgatggagggtcgccatgacccattagcgagtgtggacgcagggagcgggtgtcggtgggtgcgtgatgggaagtatggagcagagtaataggatgtcagaggaagggatgggggtcagtggggactgtgatggagaggttttttgggggccccgatgtgaaatctgcaggcagagtggggatccctgctgaccacggtggagttgtaatggggggatgagccgccacggtgggggctgcttaaggatccgtaatgggggtgtcctgcaggagggagatggttcagacccagagcctccagatgccggggaggacagcaagtccgagaatggggagaatgcgcccatctactgcatctgccgcaaaccggacatcaactgcttcatgatgtgagcgcgggagagatgggcggggctgacactggcagggtggggtgaggccgatgggccgcgcccctcacatctccatcgcctgccccatcctctgcagcgggtgtgacaactgcaatgagtggttccatggggactgcatccggatcactgagaagatggccaaggccatccgggagtggtactgtcgggagtgcagaggtgagggccatggatggacagggaaggcaggtggggcttcaagggaggaggaggagccacaagggggggttatggggattagtgatacacgtctgtggtgagctggaatggggctccattgtgagtaatagaagatcccacgggaagaggcagctctgccctggacaggggtgcagagtaggtgggtgggtcagtaagggagcgaagaggaagaaagaggttttgggaccattcaagccatccagtgctcactcactttggccctactctctgccccacagagaaagaccccaagctagagattcgctatcggcacaagaagtcacgggagcgggatggcaatgagcgggacagcagtgagccccgggatgagggtggagggcgcaagaggcctgtccctgatccagacctgcagcgccgggcagggtcagggacaggggttggggccatgcttgctcggggctctgcttcgccccacaaatcctctccgcagcccttggtggccacacccagccaggtgagtggctgcataaagtgaatggatgtgtaaagtggttccgtttcagccctgcctgggtccatgatttctgttctgggccccctcctgcagcatcaccagcagcagcagcagcagatcaaacggtcagcccgcatgtgtggtgagtgtgaggcatgtcggcgcactgaggactgtggtcactgtgatttctgtcgggacatgaagaagttcgggggccccaacaagatccggcagaagtgccggctgcgccagtgccagctgcgggcccgggtgagcatggacagagctgggtagggtcaggtgtgggagagctggtgggtccatgcatggttagttaagtctaggcatggataaaccaggtgggattgggcctgactgtatcctgacaggtgggaaggggcctgtcatgtccagatgaatggggcatgacctggtatgctgggctggcagaacacccccaccaaccctgggtagacagagtggggccaggtgttttcaggtggtcatgcatgttggtacagatcaggcagggctgagcattcctggcaatgaggggtagcggggaggtgtgtctggggaggtaaggccaggccaggtgggtagggctagggcaaggccgccctccatccacctggggctgacctgggccttcctcctgccggcacaggaatcgtacaagtacttcccttcctcggtgagtccagccccccagggtggggtggggcatgcgggcagggcggtcagggccagtcctgagattctgccctgcagctctcaccagtgacgccctcagagtccctgccaaggccccgccggccactgcccacccaacagcagccacagccatcacagaagttagggcgcatccgtgaagatgagggggcagtggcgtcatcaacagtcaaggagcctcctgaggctacagccacacctgagccactctcagatgaggacctacctctggatcctgacctgtatcaggacttctgtgcaggggcctttgatgaccatggcctggtgagcagacaggagcatccactggtggaagggtggaggttacagaagcagagagtatccctaatgaggagacagagggtatggaaggctgatatgggacatgagtaggtggtggggttgtcacgagcggggcaggtgggtcagtgcatgccctgcttgcagccctggatgagcgacacagaagagtccccattcctggaccccgcgctgcggaagagggcagtgaaagtgaagcatgtgaagcgtcgggagaagaagtctgagaagaaggtgatggagagggtaaagtggatgtggaaaggcagagggtggggttgagggagaggcagaggtcagaggctgaatggggcaagagccagaaagggctagaatggagcaagggtctggggtctggggctgactttgactccaccctgacctgacttgtcttgctcaacagaaggaggagcgatacaagcggcatcggcagaagcagaagcacaaggataaatggaaacacccagagagggctgatgccaaggaccctgcgtcactgccccagtgcctggggcccggctgtgtgcgccccgcccagcccagctccaagtattgctcagatgactgtggcatgaagctggcagccaagtgagtcattcctgagaggttcaagggagtcaggaagtgcatggtagggcctgaccacagccttctgtatgtctaccagtcaatcagctatccaccagtcaccaaacagccactacccactcacccatccacctacccacccacctgcccgtgtgtccatccagccaccattccgccagtcacctatttacttctccttttgccatttgcgtctattttgccattctcacttactgatcacctcactcattctgttgcttgctaccttccctgcagccgcatctacgagatcctcccccagcgcatccagcagtggcagcagagcccttgcattgctgaagagcacggcaagaagctgctcgaacgcattcgccgagagcagcagagtgcccgcactcgccttcaggaaatggaacgccgattccatgagcttgaggccatcattctacgtgccaagcagcaggctgtgcgcgaggatgaggaggtgagcaagcaggggcgcagcagagcagggcctgtactttgtccttcccagccttattgttccttccattccatgcagagcaacgagggtgacagtgatgacacagacctgcagatcttctgtgtttcctgtgggcaccccatcaacccacgtgttgccttgcgccacatggagcgctgctacgccaaggttggggtgtcagactgagggggcggaccatgtgggaacatcagtgggccagtgggggacagatttgttgtctgggtggtgtcttgggagggcatgcagcgcacatccacagttccctccatttgtgctcatccctccagtatgagagccagacgtcctttgggtccatgtaccccacacgcattgaagggtaagtgagggtgccacgcagtgagaggtggggggttaaggcgggggtcagaagtgggatgtgtgtggagctggggcaggatacgggcaaccagccaggacagatggacctcccttccctccctctactgccctctctactccaaatccccagggccacacgactcttctgtgatgtgtataatcctcagagcaaaacatactgtaagcggctccaggtgctgtgccccgagcactcacgggaccccaaagtaaggttttccctcagctcctcccattttgcccctcctccctgcctcgctgtcccacattcatcccttccttcctcacctcacttttccttcactttttcctctcagcttccctgctgcttcaccctccattcctccttttccatgcctcctcaccgttccctgaaccctccattcttttccttctccctccttgagcccccattcctattctcccttatcaccgctattcatccccccaacctggcctccttgcaggtgccagctgacgaggtatgcgggtgcccccttgtacgtgatgtctttgagctcacgggtgacttctgccgcctgcccaagcgccagtgcaatcgccattactgctgggagaagctgcggcgtgcggaagtggacttggagcgcgtgcgtgtggtaggtttctgtgcggttttggtgctgcatgtggtaggtttccatgtcggacgtggccggggcaggcggggctgcaggtgttcctgcttaggactcctgccgctcccttggcagtggtacaagctggacgagctgtttgagcaggagcgcaatgtgcgcacagccatgacaaaccgcgcgggattgctggccctgatgctgcaccagacgatccagcacgatcccctcactaccgacctgcgctccagtgccgaccgctgagcctcctggcccggaccccttacaccctgcattccagatgggggagccgcccggtgcccgtgtgtccgttcctccactcatctgtttctccggttctccctgtgcccatccaccggttgaccgcccatctgcctttatcagagggactgtccccgtcgacatgttcagtgcctggtggggctgcggagtccactcatccttgcctcctctccctgggttttgttaataaaattttgaagaaaccaaggaa

SEQ ID NO: 12890 - DNA, 5476 bp, Homo sapiens
agatggcggcgcctgaggggtcttgtggggctctaggccggccacctactggtttgcagcggagacgacgcatggggcctgcgcaataggagtacgctgcctgggaggcgtgactagaagcggaagtagttgtgggcgcctttgcaaccgcctgggacgccgccgagtggtctgtgcaggttcgcgggtcgctggcgggggtcgtgagggagtgcgccgggagcggagatatggtaagtagcgggtccagggaggggttcggcggtggaggtcggtcggttggcaacagtggggtctgtcggccgactcaggggtctgtggtgagccataaccggagtctgtggactgaacggcgggagtctatgggcagaatgatgaaccatctgggagttctatggtgagccacggtggggggctccttaatagaagtttagtggggactccgtgtggcagttccgtgggaaaccatgatcgggggttcttagggcagagggataagcgggttgtaaggagtcacattgagtggtctgtagtgagccgtgacgaggagtccgtgtccgggtatccgtggacagccgcgactgggggtgggtgcgggtgccaggtgggtctatgagataaacagggaggggtgcgtggagaaccgcgatgggaagtccgcagtgagttacgcggggtctgtgaggcgccacgatggagggtcgccatgacccattagcgagtgtggacgcagggagcgggtgtcggtgggtgcgtgatgggaagtatggagcagagtaataggatgtcagaggaagggatgggggtcagtggggactgtgatggagaggttttttgggggccccgatgtgaaatctgcaggcagagtggggatccctgctgaccacggtggagttgtaatggggggatgagccgccacggtgggggctgcttaaggatccgtaatgggggtgtcctgcaggagggagatggttcagacccagagcctccagatgccggggaggacagcaagtccgagaatggggagaatgcgcccatctactgcatctgccgcaaaccggacatcaactgcttcatgatgtgagcgcgggagagatgggcggggctgacactggcagggtggggtgaggccgatgggccgcgcccctcacatctccatcgcctgccccatcctctgcagcgggtgtgacaactgcaatgagtggttccatggggactgcatccggatcactgagaagatggccaaggccatccgggagtggtactgtcgggagtgcagaggtgagggccatggatggacagggaaggcaggtggggcttcaagggaggaggaggagccacaagggggggttatggggattagtgatacacgtctgtggtgagctggaatggggctccattgtgagtaatagaagatcccacgggaagaggcagctctgccctggacaggggtgcagagtaggtgggtgggtcagtaagggagcgaagaggaagaaagaggttttgggaccattcaagccatccagtgctcactcactttggccctactctctgccccacagagaaagaccccaagctagagattcgctatcggcacaagaagtcacgggagcgggatggcaatgagcgggacagcagtgagccccgggatgagggtggagggcgcaagaggcctgtccctgatccagacctgcagcgccgggcagggtcagggacaggggttggggccatgcttgctcggggctctgcttcgccccacaaatcctctccgcagcccttggtggccacacccagccaggtgagtggctgcataaagtgaatggatgtgtaaagtggttccgtttcagccctgcctgggtccatgatttctgttctgggccccctcctgcagcatcaccagcagcagcagcagcagatcaaacggtcagcccgcatgtgtggtgagtgtgaggcatgtcggcgcactgaggactgtggtcactgtgatttctgtcgggacatgaagaagttcgggggccccaacaagatccggcagaagtgccggctgcgccagtgccagctgcgggcccgggtgagcatggacagagctgggtagggtcaggtgtgggagagctggtgggtccatgcatggttagttaagtctaggcatggataaaccaggtgggattgggcctgactgtatcctgacaggtgggaaggggcctgtcatgtccagatgaatggggcatgacctggtatgctgggctggcagaacacccccaccaaccctgggtagacagagtggggccaggtgttttcaggtggtcatgcatgttggtacagatcaggcagggctgagcattcctggcaatgaggggtagcggggaggtgtgtctggggaggtaaggccaggccaggtgggtagggctagggcaaggccgccctccatccacctggggctgacctgggccttcctcctgccggcacaggaatcgtacaagtacttcccttcctcggtgagtccagccccccagggtggggtggggcatgcgggcagggcggtcagggccagtcctgagattctgccctgcagctctcaccagtgacgccctcagagtccctgccaaggccccgccggccactgcccacccaacagcagccacagccatcacagaagttagggcgcatccgtgaagatgagggggcagtggcgtcatcaacagtcaaggagcctcctgaggctacagccacacctgagccactctcagatgaggacctacctctggatcctgacctgtatcaggacttctgtgcaggggcctttgatgaccatggcctggtgagcagacaggagcatccactggtggaagggtggaggttacagaagcagagagtatccctaatgaggagacagagggtatggaaggctgatatgggacatgagtaggtggtggggttgtcacgagcggggcaggtgggtcagtgcatgccctgcttgcagccctggatgagcgacacagaagagtccccattcctggaccccgcgctgcggaagagggcagtgaaagtgaagcatgtgaagcgtcgggagaagaagtctgagaagaaggtgatggagagggtaaagtggatgtggaaaggcagagggtggggttgagggagaggcagaggtcagaggctgaatggggcaagagccagaaagggctagaatggagcaagggtctggggtctggggctgactttgactccaccctgacctgacttgtcttgctcaacagaaggaggagcgatacaagcggcatcggcagaagcagaagcacaaggataaatggaaacacccagagagggctgatgccaaggaccctgcgtcactgccccagtgcctggggcccggctgtgtgcgccccgcccagcccagctccaagtattgctcagatgactgtggcatgaagctggcagccaagtgagtcattcctgagaggttcaagggagtcaggaagtgcatggtagggcctgaccacagccttctgtatgtctaccagtcaatcagctatccaccagtcaccaaacagccactacccactcacccatccacctacccacccacctgcccgtgtgtccatccagccaccattccgccagtcacctatttacttctccttttgccatttgcgtctattttgccattctcacttactgatcacctcactcattctgttgcttgctaccttccctgcagccgcatctacgagatcctcccccagcgcatccagcagtggcagcagagcccttgcattgctgaagagcacggcaagaagctgctcgaacgcattcgccgagagcagcagagtgcccgcactcgccttcaggaaatggaacgccgattccatgagcttgaggccatcattctacgtgccaagcagcaggctgtgcgcgaggatgaggaggtgagcaagcaggggcgcagcagagcagggcctgtactttgtccttcccagccttattgttccttccattccatgcagagcaacgagggtgacagtgatgacacagacctgcagatcttctgtgtttcctgtgggcaccccatcaacccacgtgttgccttgcgccacatggagcgctgctacgccaaggttggggtgtcagactgagggggcggaccatgtgggaacatcagtgggccagtgggggacagatttgttgtctgggtggtgtcttgggagggcatgcagcgcacatccacagttccctccatttgtgctcatccctccagtatgagagccagacgtcctttgggtccatgtaccccacacgcattgaagggtaagtgagggtgccacgcagtgagaggtggggggttaaggcgggggtcagaagtgggatgtgtgtggagctggggcaggatacgggcaaccagccaggacagatggacctcccttccctccctctactgccctctctactccaaatccccagggccacacgactcttctgtgatgtgtataatcctcagagcaaaacatactgtaagcggctccaggtgctgtgcccgagcactcacgggaccccaaagtaaggttttccctcagctcctcccattttgcccctcctccctgcctcgctgtcccacattcatcccttccttcctcacctcacttttccttcactttttcctctcagcttccctgctgcttcaccctccattcctccttttccatgcctcctcaccgttccctgaaccctccattcttttccttctccctccttgagcccccattcctattctcccttatcaccgctattcatccccccaacctggcctccttgcaggtgccagctgacgaggtatgcgggtgcccccttgtacgtgatgtctttgagctcacgggtgacttctgccgcctgcccaagcgccagtgcaatcgccattactgctgggagaagctgcggcgtgcggaagtggacttggagcgcgtgcgtgtggtaggtttctgtgcggttttggtgctgcatgtggtaggtttccatgtcggacgtggccggggcaggcggggctgcaggtgttcctgcttaggactcctgccgctcccttggcagtggtacaagctggacgagctgtttgagcaggagcgcaatgtgcgcacagccatgacaaaccgcgcgggattgctggccctgatgctgcaccagacgatccagcacgatcccctcactaccgacctgcgctccagtgccgaccgctgagcctcctggcccggaccccttacaccctgcattccagatgggggagccgcccggtgcccgtgtgtccgttcctccactcatctgtttctccggttctccctgtgcccatccaccggttgaccgcccatctgcctttatcagagggactgtccccgtcgacatgttcagtgcctggtggggctgcggagtccactcatccttgcctcctctccctgggttttgttaataaaattttgaagaaaccaaggaa

SEQ ID NO: 12891 - DNA, 128 bp, Homo sapiens
cccagctactcggaaggctgaggcaggataatcgcttgaacccgggaggcggaggttgcagtgagctgagatcgcgccattgcactccagcctgggcaacaagagtgaaactccgtctcaaaaaataa

SEQ ID NO: 12892 - DNA, 1767 bp, Homo sapiens
cacggacacaggaagtggccgcacaatgcaacatctacttaccctctgagggatggtttgagtccctgtcatcgaagggtagactggcagaggaactagaagatgcagacaaggccctcttggtacctcccgcagctctctgcagtggggaagacatgcttggtgaggaggagctatggggccaggaagacgaggaccgcaggtaggtttggcaatccagctggggaagaaagagaagaaagggctcctaccacagcacttctccatccccagccgtgagcagtccctttctttgcaagggaatggttctagaactctggggtcgggtgagggggaccaaaaactaagacaaaggctgggcaccgtggctcatgcctataatcccagcactttgggaggccagggcaggaggatggcttgagcccaggagttcaagaccagcctgggctatagagcaagaccccatttctacaaaaacaataataataattagccaggtatggtagcgcatgcctgtattcagctattcaggaggctgaggtgggaggactgcttgagtccaggagttcaaggctgcagtgagctatgatcgcaccactgtactccagcctgggtgacaaggtgagactctgtctcaaaaaataaaaaaaatgaaagaaaagaagacattatgggatgcaagtctgcaaagccttaactacaaactaaagaaaccaaaaggaaaaggaagactttaaaatacaggagtagaaccatctcattttccccatagtccaataggtccctgcaattgatccccaaatgcttaaaacaaggccgggcgcggtggctcacgcctgtaatcccagcactttgggaggcccagggaggtgaatcacttgaggtcaggagtttgagatcagcctggccaacatggtgaaaccccgtctctactaaaagtacaaaaattagccaggtgtggtgtgagtgcctataatcccagctactcgggaggctgaggcaggagaatcgcttgaacttgggaggcggaggttgcagtgagcagagatcatgccactgcactccagcctgggcgacgagtgatattgtcactgtctcccccttgctaacctcctaggtgcttaggataaaacgtcaaatatttaacatggcttcacagacatcttgtatcatttggcccctggctaccttacctcacccaatttcctcctttgctctgtactctagctacactgtccgaggagttcctaaaacatcacgctgggtccgaccacaggatcttcacatgtgctgctccctctatctgcatcgctctttcctcttctcttgtttgcttaactcctatttaccctcgggcttaatcagcactttctcacctctcctagtctgttgctcttatttaagatcaaacagcagagaaatgtgaagtccactgacttccgggtggaacagggttcagtatgccaattaaattattgggtgctggctgggcacggtggctcacacctgtaatcccagcactttggaagggcaaggcgggtagatcacttgaggtcaggagtttgagaggacaacatgatgaaactccatctctactgaaacacaaaaattagctgggcttggtcgtgggcacctgtaatcccagctactcaggaggctgaggcaggagaatcacttggacgcaggagggggagggtgcagtgagccgagatcgcaccactgtactctagcctgagcgacagggtgactccatctcaaaaaaaaaaa

SEQ ID NO: 12893 - DNA, 481 bp, Homo sapiens
cagcactttgggaggccgaggtgggcagatcacctgaggtcaggagttcgagaccagcctggccaacatggtgaaaccccatctctactaaaaatacaaaaattagccaggcatggtggcgggcgcctgtaatcccagctactcgggaggctgaggcaggagaatcgcttgaaccggggaggtggaggttgcagtgagccgagatcacgccattgtacaccagcctgggcaacaagagtgaaactccatttccaaaaaaatagtatcagccgggcatggtggctcttgcctgtaatcccagcactttgggaggccatggtgggcagatcgcttgagcccgggaggttgaggctgcagtgagctataatcgcaccattgcactccagcctgggtgacagagagagaccctgtctcaaaaaagaaaagaaaatgtctactaagacctccactccctataatggcacattaagtatctccaacc

SEQ ID NO: 12894 - DNA, 6031 bp, Homo sapiens
gatcacgctgaccaccattggctacggggacaagtacccccagacctggaacggcaggctccttgcggcaaccttcaccctcatcggtgtctccttcttcgcgctgcctgcagtaagtccagctgcccctgcctgccttggagggggacgaggtcttgtaggctcccgaggtgaccacaggcccctgggcacagttccctaggtgggacctggggcaggagcagctctcagcaggtccacagcccccaggagctggaggtggcagctcagggtcagaggccttgttccccaaggactggagtgggggttccccagccccgacaggagcatgcccaaggctgcggctgtagcttcagggggctctgttagtcactggtggcccctcttagtctgagtggggctgagcaggaggtccttgtgaccaggagcagggcggctggtgacacaggtccctcatgggtctctaggcagtgaggcccacccagctcagagggaggtggaggggccctgtcaacccttgttgccccagggcagggcagggcagggcagctggtgcacggcaagaggctggccccggtgtccccttcactgtgtgcccttcaagatgggcctgcagactcttctgtgtggaagggaaagaggccactctgagttcagtgtgggtcctgccatgtctcctgcaagccagagggttccttcctcttgatgctgacaaattgtggggatatgggttcctggattagtctgaccttgatgaaggtgggggaggcatggatcggtggagacgggtctgaccctgatgaactggggggtgtgtgagtccctggggcgtggtctgaccctgatgaattggggggtgtgtgagtctctggagtgtggtctgaccctgatgaattggggggggtgtggggccccagagcatggtctgaccctgatgaattggggtgtggggggtccctggggtgtgacctgaccctgatgaattgcagggcatcttggggtctgggtttgccctgaaggttcaggagcagcacaggcagaagcactttgagaagaggcggaacccggcagcaggcctgatccaggtgagtccaggtgtcccccggggaccagcacagcccttgtcctggtcccaccttgttgaggagtggaggccgctggggctttggcattgccctgtctgtggatgggccacagcgctcaccctctgcaggaatctgtggaaggagcgaggatgtgaagtgtgtgtgttgagaaatggctccaacccctgaggctgcacaggggtggctcgtgtgaggacgctggggtggcccttgccttgtgtgggtgctggggcccggccatcaggtcctctctaccgcaccctgggaggtgagcacacccgttctgcagctgcagggccaaggctcctagagcccacacactgcagtgagtcagtgcctgacctcgtctgacccctgatgctggctgtgggcccccatgatgcccgcccggaccccacccagtgccgtcccaccatttgggggtgggtagcgtgcagtgaccactgtggcatccacaagtaattcctgagccaccttgaaaatacggacagacaatggccgggcacagtggctcacgcctgcaatcccagcactttgggaggccgaggtgggaggatcacgaggtcaggaaatcaagaccagcctggccaacatggtgaaaccctgtctctcctaaaaatacaaaaattagctgggcgtggtggcgtgcgtctgtaatcccagctactcgggaggctgaagcaggagaatcgcttgaaccagggaggcggaggttgcagtgagccgagatcacgccacagcactccagcctgggtgacagagcgagactccgtctcaaaaaaaaagagaaaatatggacagacagcaggacccccttgggaccagccattcttgcagctcctccccaaagtcttccatccactggacccgcagagctgaccaggatccctgccagcggaatgtggctataggctctctcctgtcttagacagcaaatcttgagatggagataatcctgggttaccccaggtgggccgtaaatgcaatcacatgcatccttataagaaggagatttgacacagaggaggggaaagcagtgtgaccacaaaggcggagactggagacgtggccacaagccgcggagtgtcagtggccactgcaggggatgtgcctcttgtggtcttggctctgggtccagcctaccttaaggtgtgtatttatcttccactataaaaactacaaacagctatttatttccaggcaagagttttaagaagaaccaaaatgcccccaaatctcactccactattgacggtttaaaaagtgaccacgtacgtgtggtgaaaaggttacaatagtgccagaaaaagcagcgtctgagcacccagggtcccatgcgccctgcttccctcgaaggtcactcttagcagctggtgcacatttccagagcacagctgggcctctccacaggcgcacctcagaggacctgcagccgtggttccagaccactacggtagagatacggcaataaagcgagtcacacaaatttcgtggtttcccagtgcatatggaagttatgtttacaggctgggcaccgtggctcccacctgtaatcccagcactttaggaggctgaggcaggcagatctcttgaggtcaggagttcgagaccagcttagccaacatggtgaaaccccatctctactaaaaatacaaaaaaattagctgggcgtggtggcacacgcctgtaatcccagctactcaggaggctgaggcaggagaatcacttgaacccgggagacggaggttgcagtgagccgagattgcgccactgcattccagcctgggaaacagcccgagactccgtctcaaaaaaaaaaaaaaaaaaagttatgtttataccatgccatagcttactaagtgtgcagtagcattatgtctaaaaaacagtaaaacactgcacgtactttcacttacaaatacttaattgctaaaaaaatactaacaatcacctgagccttctgcgagttgcaatctttgtgctggtagggggtctcacctcgatgctggtggccactgctgatgaggtggggctgctgaaggctggggctgtggcgattttttttttttttttgagacggagtctcgctctgttgcccaggctggagtgcagtggtgcgatctcagctcactgcaagctccacctccctggttcctgccattctcctgcctcagcctcccaggtagctgggactacaggcacccaccaccacgcctggctaattttttgtatttttagtagagacggggtttcaccgtgttagccaggatggtctcgatctcctgacttcgtgatcctcccgccttggcctcccaaagtgctgggattacaggcgtgagccactgcgcccggctgtggtgatttcttaaaataaggcaagaatgaggtttgccgcatcgattcactcttcctttcacgaaagatttctctgcagcatgcgattctgttggatagcgttttacccagtggacctcctttcagcatcgcagtcagtcctctcaaatgctgccactgctgtatcaactaagtttatataatgttctcattccttgtcatttcaacacagttcacaacatctttgcctggagtagattctgtcgaccaaaaaaaaaaaaaaagaaaccacacacatgtcaaatgtatttgggaattagaagaaaggattataaccagagatgaaccactgtggccagagggtgggggactctcgagagatgagccagtgtggcgagccacccatgtgccggagagggaggggcagggaagctctccctggctgagaagttcacataagctgcttggaaacagagttcactggctctgaggctgaaaaccagagttggcagccgttcactggttgagatgccgctgctgggccagtgttcttcctagagcatcttgtctgaattgctgcattcctgataaggaattccttgtggggttattttagaatgtctttgacactgtcctcatctcagccatgcaggcgtgagccctgccgccgtgtactctctggcctcggttggtttggacctgacagaagtgaccttaccctgctgtctgcagtgttcaccgtccatcccaagaaaccacttactttgctcatccataaatgctgctcctcacctgttagagttttatcctgagatggcagcagttcagtcccgtcttcaggctccacgttaggatggccaactttttttttttgttgttgttgagatagggacttgctctcttgcccaggctggagtgcagttgtgtgatcttggctcactgcagcctcgacctgccaggttcaagcgatcctcccaccttagcctcctgagtaactgggactacaggtgtgcaccaccatatctggctaattttttgttttaagtaaaggcagggttttgccatgtttcccaggctgggcttgaactcctgggctcaggcgatccacctgcttcagcctccaaggtgttgtgagcctctgcgccaggccagggcggctgacatgttagcaaatggcaaatcagcgtagtgaggatgtgtggacaccgccccccctgctggtaggaatgtagcgatgcagtcaccctggaaagcagttcggttgtttctcagaaagttcgtaaacgtggagttgtcacgtgacccggccattctacctctaggtatagacagacacaaaagaattgaaaacagaccttcaaccaaaaacgtgcacacaaatttcacagcagcaccactcataggaaccaaaaagtggaaacagctgaaatgtctattaatggatgaacggaatgtgatttatccatacgatcctcctatcaggaggagcgggcgctgccccttgctacgacgcggatgggccgcggggacgtcacgctcagtggagggagccagacggggaaggccgtgcagcttgcgatgcccttggcaggaaatgcccggggcggggaagtccgtggagccccgtacaccctggcggtggccagggcctgggggaccaggaaccaggagcgcctgctgaacgtcgggggtaggagggggtttatttgggggcgacgaagaggtgtggagttagataggggcagtggtcgcacagcactgtgtgtgcaggcgctactgaagtgcacgctttaacatggctaacatggtgaacttcaggatatgtctatttcagcaccgcaaaacaaaacaaaggcatagagaacggaaatccagccaggcgaggttcagtctgacgtacaggctcatgccccgagccgggctgagtccccgccctgggaggttggaggctgaggtccctggccctacccatactcccagcgcctcaggttgcccagggcccaaccaggaggtcaggaaggtaacccccaggacaggtgatacccgccaggggccaggtaagagtcatgaaaaggaaagaacacagcctccctgcgagctcgctcagggccccgagtcaagccccaaccgctcccctccttcaggccccaccgtctgacaagcgggcttgcctgtctgtcctacagagggtaaactgaggctgtggggctgatgcagcactggggcctggcctgctggcccagagtcctgagtgcctggcctacagcatgggggtcccctctgccccgttccctccacgcccggccctcctgggcgcgcccctcgccgcctgcccctcgccaactgccttgtctttccctccgcagtcggcctggagattctacgccaccaacctctcgcgcacagacctgcactccacgtggcagtactacgagcgaacggtcaccgtgcccatgtacaggtaccgccgccgggcacctgccaccaagcaactgtttcattttttattttccatttgttcttaaaccccactttttgttgttcattattttgattgatttttttctttaaaatgtatttttcacaaagga

SEQ ID NO: 12895 - DNA, 186 bp, Homo sapiens
aatacaaaaaattagccgggtgtggtggcgggcgcctgtagtcccagctactcgggaggctgaggcaggagaatggcgtgaacctgggaggcggagcttgcagtgagccgggatcacgccactgcactccagcctgggggacagagcgagactctgtctcaaaacaaacaaacaaacaaacaaaaa

SEQ ID NO: 12896 - DNA, 1015 bp, Homo sapiens
gtttaacataaatcaaatagttccaatgggttgcttcatatttgtgtgtactttaaagtcatgccagcttaaatgactgtgaggtacaatgtgttgactttgagttttgtaaattgataatttgttgctatgaaagttgtccatggtataactcatcactttttgaaggtacttagtatgtctgatactggcaagctgtcatgaaaaaattgatgcccagggaattccggggttttgctttcagatgtttgacatgtagatatttaattcttcttaagatttccctggacattgtcagtgtaaggtgtactgatctttaaacacaaactttagtttgggctcctgtttctcagcattctttgggataataatctgaatggtgtattctcaagtttttttttttttttttttttttaagtgtatgaatcaccttggggatcttgttaaaaggcaggctatgatccagtgggtctgggatgagtcttgggattctacattttcgcaagctcccagataatgccagtgctgctggtccacagacagtactttaagcagcaagacaacactttgatggacaaagtggtgctgtgcaacacccatcacatacaaattaccagttgctttcctcattgtgttttggtgcatctaaagctaagatgatctggtgtatattcttgactcttgggtatccctgtgagcattaatgaatagtttaacaaccgaccatttggtctagcatgtatggagactaccaagacaggcttattgtgttggaagaagtgatgcttatgtttttagactcttatggaatataccaattcctgtatgttagccaaggttcttgctgcaaacagaagtgaatacaacaaactgctaacttgaaaagatgctgatagaggggttagaaaggcatagtgctgaatcaaatgtatttattttaactagctctgttcatgatggctggttaatttgggcaaaaagatttattgatgaatcatggagaaaaagtgggaac

SEQ ID NO: 12897 - DNA, 462 bp, Homo sapiens
gcacaggtttgtcttattaatctacaagtctgggcaactcttattatttaatagaaagtcctagctaccgtcattcactttattttttctttctgctataattgcaatgtaaacaacttagcacaatttcttgaggagtgcatgtttctctttttgctcttgtttagaatcccttccctccttatccatgtggtgaagcctgagatgagctaaatatcttctcttttctgcagccattctccctctctgtctccccacttcttgctctgccttctgtctctctccctccctccctccctcttttgtttcttcccatgcccaacttcaaagatttactccctccaaggtcagtggtgccatgatgtggaacttatactactcgtatggttgtttttctccagaaagcctaggagctccttgaggacgagactattggcttaaagatatagtaggtactcaata

SEQ ID NO: 12898 - DNA, 537 bp, Homo sapiens
ccttggtaatataggaaaccttcttgccaatataggaatatgttgacatattagctatagcaaaaggcttatattagcaccgaatgaggctctgctgcatccattcacctagggaatatgcactgtggcgcttcccaaaggatcacttgcaggtacctcagtgtacctgatggcttgactgttgttgcagccattagtacatctcccttcttgccacctttctctccccaaatctcaacaaaaccagttgtttttaatcttaacactacccatcaccctcctacactcactgaaatgtcttcagcccctaacctctagaagagctgaggacatcatggaaggaaggtaagtctttctctgaaagagattgtagacctgggatataatggataaagtgatccccaagatgcacttttgatgttttaatttctcagattttttttgctagatacttactttgcattgctttgttgttgttttgtgaaagaacagacttctaattttaaaacacaaggtgaagaaatgttaaaaaaaaaa

SEQ ID NO: 12899 - DNA, 1617 bp, Homo sapiens
gcacattctctgcccttggcctgacgtattctcccttatcagcacataccacaagtctttcaagacctataaaatcagtaccattttctctgggaagtcatcctgattcccctctttctgcgtatggtgaagaatgctttatggaatactctgcattcctttctctcaagacttagatttaccattaccatatggaaatttctaggctgtttccaatgcctaggtggtgctcagaagtgttagtggtttagtagaatcctaattgtggagaaagacagccaaatttgggaggtttttagcatagagtaaccctggcattcagggatgtttgctgtgcaagatgggtgtggtaccagaggagctgttcctggaggaactgaatctcagtggcttgaagtggtcagttccggcattggtatgttccccttctgtattgcacagagctgggaaaccactgaagtcatgtgctctgcagaacttgttcaactggtttcctctccacagacccctaattcagatttccacccttattcttttctgcatatgctcttagtctgggcttgttttaaggtttaccacagtagagttctcagtatagttatttatttgtcttgctgagtgtagagtgggtagggccaagtatgtactccctttgaaaagtgttatcagtaagacaagatagacaggtattatgtaaatcatggagtgtcagactccattagcaggtttatttctgtggatctaaccatttcacccccacactcatgtgtacatacacatatacatagctatcattatttagagcctactactagttgctgggtgaggtgtcagagccccggcattggaaagtagtcaactcacaggttggtaggaagaatttactgacagcagtataggtttgaaaaaggaaagttttattagaaagaaggaactctgcagaagaatgcctcagcaagagagaactgagctcgcggtggatttttcccttagggtatttatggaacttaaagcaggagcttaagggtagtttggaccatattagccaataggtcatgataaatgattacatttttagacgtaatgtcagcaagggttgcacagggagtttcggcatggcattccagagatgtatagaaagtctagttgcttacaaattttaggttgaaaagagagctggaaccaggtgccgattttagataacagggaagttaattacttctaaattcctcagataagaagttttgcctctgaatggtctccttagtggactccaggtgatcactagtatttggtatgtatcatctcatttaatccttacaacaaccttatgaagtttggtgtgttgctaatcctgctttatatatgggaaatggaagctcagagaagttagcgggtaacatgtcattcttggtttttcttatgtccttccctcttatctcagggaggaagtggggtatattcctttctgtagctggctgccgcctctgctcttcagaaccttgctttcttttgttcttattcctgtatctttagcccctccttcacgtgttcttttcttgcagactataaaaatatgctttttccacaatcatttaaaaaaaataaaaagacact

SEQ ID NO: 12900 - DNA, 1616 bp, Homo sapiens
gcacattctctgcccttggcctgacgtattctcccttatcagcacataccacaagtctttcaagacctataaaatcagtaccattttctctgggaagtcatcctgattcccctctttctgcgtatggtgaagaatgctttatggaatactctgcattcctttctctcaagacttagatttaccattaccatatggaaatttctaggctgtttccaatgcctaggtggtgctcagaagtgttagtggtttagtagaatcctaattgtggagaaagacagccaaatttgggaggtttttagcatagagtaaccctggcattcagggatgtttgctgtgcaagatgggtgtggtaccagaggagctgttcctggaggaactgaatctcagtggcttgaagtggtcagttccggcattggtatgttccccttctgtattgcacagagctgggaaaccactgaagtcatgtgctctgcagaacttgttcaactggtttcctctccacagacccctaattcagatttccacccttattcttttctgcatatgctcttagtctgggcttgttttaaggtttaccacagtagagttctcagtatagttatttatttgtcttgctgagtgtagagtgggtagggccaagtatgtactccctttgaaaagtgttatcagtaagacaagatagacaggtattatgtaaatcatggagtgtcagactccattagcaggtttatttctgtggatctaaccatttcacccccacactcatgtgtacatacacatatacatagctatcattatttagagcctactactagttgctgggtgaggtgtcagagccccggcattggaaagtagtcaactcacaggttggtaggaagaatttactgacagcagtataggtttgaaaaaggaaagttttattagaaagaaggaactctgcagaagaatgcctcagcaagagagaactgagctcgcggtggatttttccttagggtatttatggaacttaaagcaggagcttaagggtagtttggaccatattagccaataggtcatgataaatgattacatttttagacgtaatgtcagcaagggttgcacagggagtttcggcatggcattccagagatgtatagaaagtctagttgcttacaaattttaggttgaaaagagagctggaaccaggtgccgattttagataacagggaagttaattacttctaaattcctcagataagaagttttgcctctgaatggtctccttagtggactccaggtgatcactagtatttggtatgtatcatctcatttaatccttacaacaaccttatgaagtttggtgtgttgctaatcctgctttatatatgggaaatggaagctcagagaagttagcgggtaacatgtcattcttggtttttcttatgtccttccctcttatctcagggaggaagtggggtatattcctttctgtagctggctgccgcctctgctcttcagaaccttgctttcttttgttcttattcctgtatctttagcccctccttcacgtgttcttttcttgcagactataaaaatatgctttttccacaatcatttaaaaaaaataaaaagacact

SEQ ID NO: 12901 - DNA, 1616 bp, Homo sapiens; identical to SEQ ID NO: 12900

SEQ ID NO: 12902 - DNA, 344 bp, Homo sapiens
agacagggtctcactctgttacccaggctggaatgcagtggtgtgatctgggctcactgcagccacaacacccccaggctcagatgatcctccttgtctcagcctcccaaagtgctgggattataggcgtgagccacctcacctggcagtactgtgttcttaatgtatatcatagttaacccccactcccttattttcttactaaataataggtgtgaaaattaaatttttgacatatatggctctagcagaggattgcttttacagagaaataggtgcctgtcttctactttgtagaggactcttacctgttgttttcttctcaagagctgctcacaggttag

SEQ ID NO: 12903 - DNA, 344 bp, Homo sapiens; identical to SEQ ID NO: 12902

SEQ ID NO: 12904 - DNA, 1108 bp, Homo sapiens
agttccaccaacagtgtaaaagtgttcctatttctccacatcctctccagcacctgttgtttcctgactttttaatgagcgacattctaactggtgtgagatggcatctcattgtggttttgatttgcatttctctgatgaccagtgatgatgagcattttttcatgtgtctgttggctgcataaatgtcttcttttgagaagtgtctgttcatatcctttgcccactttttgatagggttgtttgtttttttcttgtaaatttatttgagttctttgtaggttctggatattagccctttgtcagatgagcagattgcaaaaattttctcccattctgtaggttgcctgttcactgtgatggtagtttcttttgctgtgcagaagctctagtttaattagatcccatttctcaattttggcttttgttgccgttgcttttggtgttttagacatgaagtccttgcccatgcctatgtcctgaatggtatttcctagttcaaccattgtggaagacagtgtggcaattcctcaaggatctagaactagaaataccatttgacccagccatcccattactgggtatgtacccaaaggattataaatcatgctgctataaagacacatgcgcacgtatgtttactgcggcactattcatgatagcaaacacttggaaccaacccaaatgtccatcagtgatagactggattaagaaaatgtggcacatatacaccatggaatactatgaagccataaaaaaggatgagttcatgtcctttgtagggacatggatgaagctggaaactatcattctcagcaaactatcacaaggacagaaaaccaaacaccgcatgttctcactcataggtgggaattgaacaatgaaaacacatggacacagggtggggaacatcacacactggggcctgttgtggggtagggggaggggagaggggggagggacagcattaggagatatacctaatgctaaatgatgagttaatgggtgcagcacaccaacatggcacgtgtatacatatgtaacaaacctgcatgttgtgcacatgtaccctagaacttaaagtataataaaaaaaaaaaaaaagaaa

SEQ ID NO: 12905 - DNA, 19459 bp, Homo sapiens
  SITE (961): n equals a,t,g, or c
ggacagcgtggagaagggcgagctggccgaccgcgtggggaaggtgggtccccggaggcttggctggcggtggggctgggtcacagctttgaaatctgattcttcgtcttccccgtctccgtgtccaggtgtccgtgttcttcaggaccagcccaaagcacaagctcaaaatcatcaaggttcgctgggcaaggcaggcacaggtgcgctgctggggccgggccagagacactgtggctcgaggagctcatgcgtctgtcgggtgacagtgcagggcccgaccgtggcttccttctctaggtccaggcagctgccccgggagttaccttttcatagccagggggaggggaggaggttgagcaggggcgcgtgggcagctcccttggagaggacgaggctctgaagttgccagcaacacttgcgctgacagccccttggccagaacacagtcacgggcccaggtttagctgcaggggatgctgggaagtgtcatctgtagctgggcggacacgagccccaccaaacctggggataattttaaagaagatgggagaactgggggacctttgctacatacagtgaaaactgggagctgtaattggataacgtagagggaaaaactaaaagagaagctatcttttttttttctgggggtggggttgtaggtacggagtcttgctctgtcacctaggctgcagtgcagtggcacaatctcggcttacttcaacctctgcctcccagggtcaagcgattctcctgcctcagtctccccaagtagctgggattgcggtgtgcaccagcacacccggctaatgtttgtaattttagtagaggcagggtttcgccatgttggccaggctggtctcaaactcctgacctcaggtgatccgcctatcttcgcctcccaaagtgctgggtgctttttggctttattcctgttactcaactccgtgcctccgtntcctcatctgtaaaatggggaactattaatgccgtcagctgattcacagggttggtagaaaattaaacaaagccaggcccatgaatctcttggcacacagcaggagcccaataaagagctgatgtgatttttctgactctgaataccaaaaaaaggtagaaaatgtgcttggttttctcgcctgtgctctgaaagtttgctcttgagctcttttagtagacgggctttcttctttcatgttatttttagctctacagagtaaatccctatgtgagttactcctcaaagaaggtagtaatacttaccaggtaccccatggtttccagggccgcactgttgattactgtttattactgggactggataacctttatgagcctttactgaccgtgctgggcaccgtcacatccgtcatctcagtttgggcctcacaacagccctgggaagaagaaactgttgctcccactttgcagatagggaaactgaggtcaagagggtcaagggctcgcccaattcccacagctaatgtgggtgaagctgggattcgaattccgggtgccctccagacagaggtgtctgtggctggccacagggtgtgcatggccgggcactgggaggtggtcgtcaggctgcaggccttcattgcctgctctttccaaaggctctgcaggagtcaggggcgatcgtggccatgactggggatggggtgaacgacgcagtggccctgaagtctgcagacattgggatcgccatggggcagacagggacggacgtcagcaaagaggccgccaacatgatcctggtggatgatgacttctcagccatcatgtaagctgcccttctggttgtttttcagttgcaaaaatgcctggggtcaccagcttctccctggaacctgctactgtggagatagagggggggggggtctcgcggagtccccagggagagctgaatctcggggctcgtcagtgtggcaggtgcccccaaccccaagcaccaacagcctctcatagcagggtcatggggtccatgatgcctggggctagtcacatgctgcccccaggggaatgttacggatatgaagcagagatgggatttgctgcctgtgggtgcatttcatgtggtactgggaatgcccgcctggctcaggctggtgggcagcagctgaatatgtaaggaaaacctgtggccaaatacgtgctcacacttgagtgtggggtgagaaaggattaaaatgaacatcttccgtttgaggcctgcgtgttgatacatatatctcaggcattgcaaagagacctgggcagaaacacccccatcgctgaccacggaggtgctctctaggttctggggcttgcacaaaactatttgttctgtttcacttttctgtatttttttcttaatacatttaccttcctaattttaattagttctgagactctcctcataagctaatcgcagtggttagttgggggtgagggaaaactttttaagcctgatacaaaaaatccaaataaacaaatattgaggctaggtggatcgtgcactttacaaaggtgtctccacagttgattcgccataggaagccttaacacacttagaaaaaaaaaaaaagtcatagatagctcttattattttgaaatacgtcccatcaatacctaatttattgagagtttttagcatgaagggttgttgaattttgtcaaaggctttttctgcatctattgagataatcatgtggtttttgtctttggctctgtttatatgctggattacatttattgatttgcgtatattgaaccagccttgcatcccagggatgaagcccacttgatcatggtggataagctttttgatgtgctgctggattcggtttgccagtattttattgaggatttttgcatcaatgttcatcaaggatattggtctaaaattctcttttttggttgtgtctctgcccggctttggtatcagaatgatgctggcctcataaaatgagttagggaggattccctctttttctattgattggaatagtttcagaaggaatggtaccagttcctccttgtacctctggtagaattcggctgtgaatccatctggtcctggactttttggttggtaaactattgattattgtcacaatttcagagcctgttattggtctattcagagattcaacttcttcctggtttagtcttgggagagtgtatgtgtccacagccaatatcatactgaatgggcaaaaactggaagcattccctttgaaaactggcacaagacagggatgccctctctcaccactcctattcaacatagtgttggaagttctggccagggcaatcaggcaggagaaggaaataaagggtattcaattaggaaaagaggaagtcaaattgtccctgtttgcagacgacatgattgtttatctagaaaaccccatggtctcagcccaaaatctccttaagctgataagcaacttcagcaaagtctcaggatacaaaatcaatgtacaaaaatcacaagcattcttatacaccaacaacagacaaacagagagccaaatcatgagtgaactcccattcacaattgcttcaaagagaataaaatacctaggaatccaacttacaagggatgtgaaggacctcttcaaggagaactacaaaccactgctcaaggaaataaaagaggacacaaacaaatggaagaacattccatgctcatgggtaggaagaatcaatatcgtgaaaatggccatactgcccaaggtaatttacagattcaatgccatccccatcaagctaccaatgactttcttcacagaattggaaaaaactactttaaagttcatatggaagcaaaaaagagcccgcatcgccaagtcaatcctaagccaaaagaacaaagccggaggcatcacactacctgacttcaaactatactacaaggctacagtaaccaaaacagcatggtactggtaccaaaacagagatatagatcaatggaacagaacagagccctcagaaataatgccgcatatctacaactatctgatctttgacaaacctgagaaaaacaagcaatggggaaaggattccctatttaataaatggtgctgggaaaactggctagccatatgtagaaagctgaaactggatcccttccttacaccttatacaaaaatcaattcaagatggattaaagatttaaacgttagacctaaaaccataaaaaccctagaagaaaacctagacattaccattcaggacataggcgtgggcaaggacttcatgtccaaaacaccaaaagcaatggcaacaaaagccaaaattgacaaatgggatctaattaaactaaagagcttctgcacagcaaaagaaactaccatcagagtgaacaggcaacctacaacatgggagaaaattttcgcaacctactcatctgacaaagggctaatatccagaatctacaatgaactcaaacaaatttacaagaaaaaaacaaacaaccccatcaaaaagtgggcgaaggacatgaacagacacttctcaaaagaagacatttatgcagccaaaaaacacatgaaaaaatgctcatcatcactggccatcagagaaatgcaaatcaaaaccactatgagatatcatctcacaccagttagaatggcaatcattaaaaagtcaggaaacaacaggtgctggagaggatgtggagaaataggaacacttttacactgttggtgggactgtaaactagttcaaccattgtggaagtcagtgtggcgattcctcagggatctagaactagaaataccatttgacccagccatcccattactgggtatatacccaaaggactataaatcatgctgctataaagacacatgcacacgtatgtttattgcggcactattcacaatagcaaagacttggaaccaacccaaatgtccaacaatgatagactggattaagaaaatgtggcacatatacaccatggaatactatatgcagccataaaaaatgatgagttcatgtcctttgtagggacatggatgaaattggaaaccatcattctcagtaaactatcgcaagaacaaaaaaccaaacaccacatattctcactcataggtgggaattgaacaatgagatcacatggacacaggaaggggaatatcacactctggggactgtggtggggtcgggggagggatagcatcgggagatatacctaatgctagatgacacgttagtgggtgcagcgcaccagcatggcagatgtatacatatgtaactaacctgcacaatgtgcacatgtaccctaaaacttagagtataataaaaaaaaaaatttaaataaaaaaaaaagtcataatatcagctctataattcttttcagaatattttagtaaaatctggcggtgggggcaccacggtcggtaattgtttttctacattagtgaccccaggtcaaggtttaaaagggcttccgcgaagagccttctaaagacagaagcaggcgatgtccttcagcggccccatcccgccctccttaccgtcctccggacctcatttttaggccgaactggttttgctgcgtctctctctcctctttggtaaatcgcggagatgcacggcgcacttcgggagtctgggcagggatggggccccctggctcggccggagagtaattcatggtctgattggaggcatcaggtgtacccttggcacagaagggcgaacatggctcaaggatcagttcccagtggccgaggggcacctgttagaacaccaacgtctcctacaaatgtgtccccaagaatgccagcaaggggaaccagcaggggcccaagtataacatcaatctgggcgagtcaccactgccccttgcagcaaccgatgcactggtccagccctcccgcaggcccgctccgtgagtaaatggctctcttctcttgcaggaatgcagtggaggaaggcaagggtattttttacaacatcaaaaactttgtccgattccagctgagcacgtaagtagaggccagcattccgagtgtcattaagcaccacgcctggcgtgcggccgctgactggctgcgtgtgccccgcaggagcatctccgccctgagtctcatcactctgtccaccgtgttcaacctgcccagccccctcaacgccatgcagatcctatggatcaacatcatcatggatgggccaccggcgcagaggtgaggcagggccggctgggagccctgtgtctctttacccacctgcggggcttcctccaggggctgctggctgtgccccaaggctataaggatgaacaaatacagccactttccatcaggagttcccagaaaactgaagtgtgttgcactggagtgagactgggagtagaaggcagaggagaaagtacctgggccggcagagctgggtgaggatggaactttccgctccctctgcctggatgctctctctgggcaacctgcatggctcattctcatgcttcattccagtcaccagtcactgccttcaggaagtcttccctgattgcactcccactcaatcccctcaccctgctgtatttttccctagagaggaagatacacacagacacacttttccttatggatctgattgtgatctgtctcccctttagaacatcagtttcatggaggcggagtttgtgtttcatccctgatgtctagagataaagggcttgccactcagtaggtgctcaggagtccacctgctccgcgacttaatatccccttcaacaagctggccaagtggtgtgggggaaggaatgcgctttggagtcaggggacccatctggccacgtgtgcgtaaccgtatgagcacagagccagtgcttccgctggagctcagtgctgctgttatcaccagtgacagctgccaagggaaagagagtcctcatttgtgtccccaaagccaagtgtgagggttacctctcctgccagccctccctgggagcagaagtgggaccaggaagctggcctcagctgtgtctgagcggcagggcctcacccggccactcccaccataccgcctgctgcgggtctagcctcaaccctgctgtgtggagttggctggaggctggtctctctcagctgatgaggggctctgcggagggcggagcctggagcctgtttctccaggcgcaacgttggggggggtcccctcggggtgatggagatcatctgggtgtatggaactgtgtgtggttggccttactgggtggtcttccttcactgtctgcgggacagatggaggggcacagctgcccatggacccaggctctggggcttctggaaggtgccgaggagggcaggtgcgatgcctgggggcgttcagcaaatgcctggccctgccccctgtgccaacttggcctgggaggctcaggcacagctgtttcaagggtcctttatttcattcctggttcatttcaaagtgtctgtgtcttgttcggagcagcttgggggtagagcccgttgacaaagacgccttcaggcagccaccacggagtgtgcgggacaccatcctcagcagagccctcatcctgaagatcctcatgtccgcggccatcatcatcagcgggaccctctttatcttctggaaggaggtgagcgagggtcaccccggcctgttctccaagccctggtgcagtgcagacgctggggactgcagtccctgccctcctgccacagctcacatctgggagaggcaaacatgtacacacaccggacaatgtgatgccatcagaggcgtggggtgcatgaggcaaagggactgggtgacccctgaaagaagggaggtcgccaggtgtgtgcctgggaactacagaggccagcggggtggagatgactttgccgagacgggagttgaaatgtacatgaggacaggctgccccctgttcccttgtcaccaggaaacaatttgaaatctgctaaatatcctcctgtgttacactctagaggtgattgtttgctttggatctaggcctgggtcaccttttcatggcctgcaggttcagggagctctgtgccaggacgggccatgatctaggtgggaaatgaggcaggtgacccatgtgaccacaccacagattgcccatgtgcaggaagcgggaggggacctggccgggtaccctgcctccattttccctccagctctccctctactactgacggccatccttcagccttccttgtaggaaatgaccttcactctgggtttaactggagtggcatcacctcccagggagacagttacttcctggaggaagtggtgtttcctccacccataggtgccctgcccccatcctcatggtggcagcaaatcagcatgtgctggggagaccctggggtagcagccactgacctcacacctggaggaagctgtgtgaccgattcatgagcttgtaagtggctcccagccgtgccccaggagcagtgaggcaggcctgtgccctttggttcaggatggaggttgtctcttcccgcctaacctctcacctttgtgctcaccttccagatgcctgaagacagagcaagcactccccgcaccacgacgatgacgttcacttgttttgtgtttttcgatctcttcaacgccttgacctgccgctctcaggtgagacccgggctgaccctcctcgctgcagagctgctgtgtgttctcgacagcagcgccccgaccctgcccgcagcattgagcggctctggctcagcgtgggcagtcagagctcccctgcctgtacctggggtgtggacagcacacaatcccccgtgtgaccttctccctgcagaccaagctgatatttgagatcggctttctcaggaaccacatgttcctctactccgtcctggggtccatcctggggcagctggcggtcatttacatccccccgctgcagagggtcttccagacggagaacctgggagcgcttggtgagtggtggggacgggaacgacaggtgacctcgaccagggccatggggggcggcagctgccaggtggggagctgcagcccaggaggggtcagtgcgggaaagcagagctcaccaggggccggctctgtcttcagggcccttctgtcctcacaggaagggactctaacgtgggtgatgtgacggatgcacagaaacccctaggaagaggcctgtcactcaagagtagtagggtctggggcccaaggggcaccggcatcccaggcgtccggctggaggctcagagcacgtgcagggaggaaggagggagcaaggcctggactcagcctgggaggtaccccagctggggagcctggacttgaccctggggccagtaatgtgacttagagatctggtcacctgaaggcagggagctgggctgtcttccagttttggctgaaagggacatgattcagtcaccgtggttttccaagggcacacaccctggtgtggagcccaggggactccccgacattgtcagccaagcgagtgtggcacctttctctgaagctgcggttatggcaggcatggggcaaggggagggagccagggacaagtcatcgaccccacccttttccccagggtgctgagagccacccccaacccggaatagaggacgagggaggccagtgaggcagcccccacggcccaccgcctccccgccgcagggcccagagtgggtcatggctcagatctggagggtcatgggattatgcatcagacctgaggctgcagtgacaacggtcctatgacctccaggcaagactgggatggtcaactctgccttgtcctccaaaaagcagtgtcagtgtgggtcaccagtgaatgccctgtaggaacagacaagaggaccccccaaaacactctgctcactggctgtttcccaccgccgggaaggaagtcggcttcccacgcctgaaggggttgtgcttgggcagcccgtacatccgacctcatcaacagggagccagggatgttcctcaaaacagcatgtgacaggagcagagggagacgctgggaattcatcccagggaacatgtcgggtgcactggacagggagccagactgtcactcaggacattgcaagcagcagggcactgggacagctgctgtcgggaaagaaactcattccccttccagcccgagtccataacatgctcccagctgcctgccagacccaccctgtgctctggagctgcctggtgtttgcctggaaccacaggcaggcccttctggaactgcagcattttggatcctgggttaggaagatctccctgccttcaggggaatgaaaagggctggtcctccgcacctctcactttatcaggaggactggcagggaaggcgcttcctgccggcacaacagagctgcagcccgtcctgaatcttttctgttttctcccttggcagatttgctgtttttaactggattggcctcatccgtcttcattttgtcagagctcctcaaactatgtgaaaaatactgttgcagccccaagagagtccagatgcaccctgaagatgtgtagtggaccgcactccgcggcaccttccctaatcatctcgatctggttgtgactgtggcccctgccgtgtctcctcgtcaggggagacttttaggaggccgcagccttccatcaccggatcagtttttcctcttaggaaagctgcaggaacctcgtgggctccagggacccaggcccacatccatccagcgttcccgctggctgtgggacagacagggaggggcctgtacagaaacaccacactgtttattaaatcacaatgatttttattaaccatgtctaactacgtatctgtgccacagcttgcagtgaggcaggccactcgtggcagatacaaggggctcctgagaggcagtgggtaggatggtcacactctgcccattgccctcctggaggccccatttcctcatcataaaatgagggacttttaaataaagtgctatgccgggggataattattttgatgtgtttacctagggtttttcatacaaggggccaggttggaaaccaacagccatgtgttaatggccacgtggggtgagcagcaatccatcatgaatggcctacaggaaggcctcggcttttggacataaagagtagggctgggcatggtggctcacgcctgtaatcccagcactttgcaaggccaaggcaggcagatcacttgaggccagcctggccaacacagcaaaaccctgtctgtctctactaaaagtttaaaaaaaaaaaaaaaaaaacagttgccaggcgtgatgatgcacacctgttaatcccagctactcgggaggctgaggcaggagaatggcttgagtccaggaggtggagattgtaccactgcactgcagcatgggcaacaaagcaagagtctctctcagaaagtggcccttctctccggaaccaggaactgtagtatctcctgctgcctgcagacaagcttgatttcccactgccccaaagacttccaaaaacccatctgctcttccacgtgacagatggcagaggagagaggtctccatgctgttcttctgcctgaagccacgccagaaccaccaaagggaaccagaaggggaactccgtccccatctctcaggaaataaggccagagctagaaccccccagttactagtcaggcctcactagagaaacagaaccaacaggatggagggagatgcagagatttgttttaaggaactggctcataggatgttgggggctggcaagtctaacatcttgagggcaggccagcatcctggagacccagggaagagctggggatgcaggctggaggcagaatttcctcctcctcaagggagttcagccttttcctcttatagtcctcatctgatcggatgaggcccactgacgttatgaaggataaactgttctacttcaagtctacgggcttacatgttagttacacagcgccatctagaccagtgtttgcttgacgaaaatcaacttggcctggccaagttgtcagataaaagtacccgttgcacccagccacggtagctatgaaaagggctaccaggggtggtaacagctgggtcagacgaagataaggaaggtcagagtggacccctgccagggttccaggcagagtccaaagtcctccatagtaggattcacagcctgggaagaagcccctctctggctacaacctgtgacaccagggccacaggaggagatgcagcgatgggccattcctagtgagacacagacacagggctggctggagaagaaaccttttgagctgtggggctgtcttcctagaagctgccaacccctggaaccactaagaggtcaaggctgaagtgtgccacttccacagtctgctaaggagtgcctccccctgagtcagggacaattcttgctctacttttcaggatccttgggcacactgctggcccgagacatttacttcccatttaaaattaagtaatcaaaataccagggtcgattgatatttgcaataacaacaaaaattactctgaactcttgcttatgtaaactttagggataaaactgtagtaagacacaaaatgctaacaataaaatataaattagactacattaaaactaagaccttcttttcattaaggacacagtagacttgaacaccaccattaagcaacttagcttgatttacacttgtagaacaccccattcacgagtagcatagaaacagtcaccaaaataaagagcagaaatcaaacgaaaaagcaaaaatagaggaaaatcaatcaaaacctagtttttcgaagagatcaataaaactatcagtcttgcaataagcttatcaaagaaaaaagggaagagaaatgaccaatgtcaggaatgaaaaagtgtatcaccacaaacccttcaagatattccaacaataataataaataatactatgtacatctttatgtacctaaattcaatcaattggatgaaataaaccaattgcttgaaaaccaaaaactaccaaaactcactgaagattaaatagataagctgaagttgaaacccttccaaaaaaggcagtttctgaagccagatgatttcactggtgaattttactaaacttgtaaagaaatggcaattcgatacactgaattccaaaaataaaaggggaccgagcacttctcattttataaggtcaacaatcactctgataccaaaactagagaaaaatactagagaccaacatcccttatgaatatatgcacgaaaatcctcaacaaaatatgaggaaatcagatctagccaggtaggaagaatataagacaccaggacgaagtggggttaattgaggaatggaattcaagcattccaaagttcaacattcaaaaccaatataactgaaaagttcaacattcaaaaaccaatataactcactatattaatagtctgaagaaggaaaaacacatggttatatcaattaatgcagaaaaggcatttgataaaattcaatctccatttgtaataaaaactctcaaactaggaattgaaggaaacttcttcaacctgataaagaacatctacaaaaaacctatagctaacatcatacttaatgatgaaaaactgaattctttccccacaggataaggtccaagggtgaccagcctcaccactcctattcagcacagtattagaagtcctagccagtgtaatatggcaagaaaagttaaaaggcattagcaaagagcctggaaaggagaaaatcacagataacataattgtccacacagaaaatcccaacaaatctttttaaaaaagaaaaaccctcctagaatcaacgagtttagtaaagccacaagatacaaggttaacacacaaaaagcagtcgtatttctatatattagcaatgaacaactggaaactgaaatttaaaattgaatactatttgtctgtctcaaaaaaaagtatcaattctcccgagattgttgtattaggtttaacacaattaccatcaaaatcccaggatttttttgtttttgtttttttttaagacacagataaacttgttctaacaagcttggtatgatattgttatcagcagacctatttcaatttcactggtttttacatagtatctgatgttaggcaaacctgagtttaagggcacagtgctccaggtggctggccaagtctgcccaggccttctgatactgactgcaggtccaagagtttcccacaaccaccttcaggttggatgattcgttgatgaggcacacagagctcactgacacctctcatgctcacagccatgtctattaccaggaaaagatacagattagaacagccccagggctgcaactgcagagactggtcaccctctccctctgagctcaacagtttctgagtcctgagtctttctagccaatcactgggtctgagagtggtttcctgccccccacaacacaagttctatgaaattgtatgacacacatcaattcaggtaaccactgctacaatgaggaggcaaaacttccatcgcccctgaaaaactcctccttactttttatagtaacaccctcctaatcccagcaacctctaatcccttcttcatcaccataatgttgttccttcaatactgttacataaatggaatcatggtatagaaccttttaagactggccagctgccccaggatggaccccaggtgtgatggcaagcacctgtaatcccagctactcgggaggctgaggcaggctaatgtcttgaacctaggaggcagaggttgcagtcagctgagatcacaccactgcactccagcctgggtgacagagtgagactccatctcaaaaagtaaatatatatatatatatatatatatatatatatatatatatatatatatgcatacacacacacatatctcatttatatatatacacacacataaaaatatatatatatacacacacacacatatatatatatataaaacccttttgaatagataaaagatttaagaggtaaaaacagaaaccacagtagaagaaaatgatttttaatactcagagtagagacagactgcctaaacaaacggcaaatccaaagacccttaagcagaaatgctgggaaatatgacagaaactgtaaaatttatgggcagaaaaacgccacaaacgaagtcaaataaactgtagaaaacattgaccatacatgggaaatgctacttcattcataaaaagcactgttggccgggtgtggtggcttgcacctgtaatcccagcactttcggaggctgaggcaggaggatcccttgagttcaggagttcaagaccagcttgggcaacatattgagacctcatttctattttattttttaaaagcactgttacaaatcgataagaaaaagaccgacaccctagaaaaccaagaaaaagatatgatacagaaagcttttgaaaaatgaggctgttcactgtcacttggtagaaaaatttaaacagtacagttttgagcaagacaccatatgggagcccagcccacaagagactgcacaccagcctggggctcagcagcaccagggcagaggcacagcaaagtgcgggctgccactgccaaggtgcaagtggggtgcgtgttcccactcactggcatgggctgctgccactgaaagcagcctcaccctccccagtggcaaggtcacagcacaactgctgttacctcccacccaagcattccaccggaggcctggggactgccccctccccagctaccacagaaaatgcctgcgtatgccatggagggacctcagacaagcccgcccagcctggctttgccgcacatgctgatatggcttggctgtgaccccacccaaatctcatcttgtacttcccataatctccacgtgtcatgggagggagccgggtgggggaggtaattgaatcatgggggtagttacctccatgctgttttcatgatagtgagttctgacacgatctgatggttttataaggggctttgctcctgctttgctctgcacttctccttcctaccatcatgtgaagaaggacatgtttgcttccccttccgccatgattgtaagtttcctgaggcctccctagccatgctgaactgtgagccaattaaacgtctttcctttagaaattatccaggctcagatatgtctttattagcagcatatgagaacggactaatacacacaccctatgctggaacacacagtctagatgactggggacggcccagccgaggccaccactattggtacctgagcactcctctcagactgctgagcgtgggttcacccaccctgccactacctgcactagttggcatctacatgcacgtgccacctgtgggcctggagactggcccacccagctcatcacagccaccaccactaccaggtacactactagggacccagagggttaccctgccattgccactgccactaccatctcctatgccacactggctgcccaggggcccaagagcccagccacctggcccactgctgccatttagcatccaagcaagctatcctcaacaaaacactagcaaactgaatccaacagcacatcaaaaaaaaaaaagaaaaaaagaaaaaaagaaaacaggccgggtgtggtagctcacgcctgtaatcccagcactttgggaggtcaaggcgggtggatcacttgaagcctggagttcgagaccagcctggccaacatggtgaaaccctgtctctagtaaaaatacaaatattagccaggtgtgggggtgggtgcctgtaatccccactacttgggaggctgaggcaggagaattgcttgaacatagcaggcagaggttgcagtgagtcgacattctgccactgcactccagcctgagcgacaaagcaatattccatctcaaaaagcaaaacaaaacaaaaataatacaccacaataaagtgagatttatcgcacttatgcaaggatggttcaacatacagaaatcaataaatgtgatacatcacattaatagaatgaaggacaaaaaccatatgatcagatataagcaattagtaaactgatgcagaaaaagcatttgataaaacacgacattccttcctgaaaaaaaactgtcaacaaaccagacagaagggacatacctcaacataatcaagaccatatatgacaaacccacagctgacatcatcctgaatggggaaaagctgaaagcctttcctctaagaactggaacaagacaaggatgcccacttttaccactcctatgcaacataatattggaagtcctggccagagcaatcaggcaagagaaagaaataaaaagcatcccaactggcaaagaggaactcaaattgtccctttttgctgatgatatgatcctgtatctagaaagactccatcaaaaaactattagatctcataaattcagtaaagttacaggatacaaaatcaacatacagaaatcagtagtgtttctacatacagataatggaatatctgagaaataattcaagacaataaccccattgacaattactacaaaaaaaaaaaaaaacctaggaataaatttaaccaagaagtaaaagatctatacaaggaaaactacaaagcactaatgaaagacattgaagaggacacaaacaaatggaaaacatcccatgctcatggatcagaactaataccattaaaatgaccatactgcccaaagccatctagagattcaatgccatccctatcaaaatatgtcatttttcacaaaattaaaaacaaatcctaaagttcatatggaaccaaaagagagcccaagtagcctaagcaatcctgagcaaaaagaacaaggttgcaggcagcataccacctcacttcaaaatctattacagggctatagtaaccaaaatagcatggtattgctttaaaaaaaatttaaaaagagacacatggaccaatggaacagaatagagaaaccagaaataagtctacatatctatagccaacttatgttcaacaaagttgccaaaaacatacactggggtaaggacagtgtcttcaataaatggtgctgggataattggatatccatatgcagaagaatgaaaccctacctctcaccatctacaaaaaccagatgaagacgaattaaagatttaaatgtaagacccaaaactataaaactactagaagaaaacagggaaaacaattcacaaacccaacaatttaaaaataaacaatcccattaaaaagtagacaaaggacatgaatagacatttctcaaaagaagacatataatggccaacagctatatgaaaaaaaaaagagctcaacatcactaactatcatccaatccagcaatcccactactgagtatttattcaaaggaaaagaatcagtgtgtccaagagatatctgcatgccgacatttactgcagcactattcgcaatagcaaagatgtagacacgacctaaacatccaccaatggatgaacggataaagaaaacgcggtatataccctctcatgccagtcagcatggcaattattaaaatgtcaagaaacaatagatgctgatgagatcgtagaaaaacaggaacgcggctgggcgcagtggctcacgcctgtaatcccagcattttgggaggctgaggtggacggatcacaaggtcaggagatcgagaccatcctggctaacacggtgaaactctgtccctactaaaaatacaaaaaaattagccgggcggggtggcgggcgccctgtagtcccagctactcgggaggctgaggcaggagaatggcgtgaaccggggaggtggagcttgcagtgagcggaggtcacgccactgcactccaggcctggggcaacagagtgaggactccgtctcaagaaaaaaaaaaaaaaaaaagaaaaaacaggaacgctcttccactgttggtggtaatgtaaattagttcaaccattgtggaagacagtgtggcgattcctcaaagatctagaatcagaaataccactggacgcagcaatcccattactaggtacatacccaaaggaatataaatcgtatgttacaaagatacatgcacacatatgttcacggcagcgctattcacaataacaaagacatggtatcaacccaaatgcccattagtgatagactggattttaaaaatgtggcacatatataccatggaatactaagtagccatcaaaaagaatgagatcatgtcctttgcaggaacatggatggagctgggagccattaccctcagcaaactggcacaggaagagaaaaccaaacactgcatgttctcacttataagtggaagctgaacagtaagaacacatggatgcagggaggggaaaaacacagactggggcctgttggtggtagggctgcgggagggagaggattaggaaaaatagctaacgcatgctgggcttaatacctaggtgatgggttgataggttcagcaaaccaccatggcacacatttacctatgtaacaaatctgcacatcc

SEQ ID NO: 12906 - DNA, 6989 bp, Homo sapiens
  SITE (4281): n equals a,t,g, or c
gcggccgctgactggctgcgtgtgccccgcaggagcatctccgccctgagtctcatcactctgtccaccgtgttcaacctgcccagccccctcaacgccatgcagatcctatggatcaacatcatcatggatgggccaccggcgcagaggtgaggcagggccggctgggagccctgtgtctctttacccacctgcggggcttcctccaggggctgctggctgtgccccaaggctatagggatgaacaaatacagccactttccatcaggagttcccagaaaactgaagtgtgttgcactgcagtgagactgggagtagaaggcagaggagaaagtacctgggccggcagagctgggtgaggatggaactttctgctccctctgcctggatgctctctctgggcaacctgcatggctcattctcatgcttcattccagtcaccagtcactgccttcaggaagtcttccctgattgcactcccactcaatcccctcaccctgctgtatttttccctagagaggaagatacacacagacacacttttccttatggatctgattgtgatctgtctcccctttagaacatcagtttcatggaggcggagtttgtgtttcatccctgatgtctagagataaagggcttgccactcagtaggtgctcaggagtccacccgctccgccacttaatatccccttcaacaagctggccaagtggtgtgggggaaggaatgcgctttggagtcaggggacccatctggccacgtgtgcgtaaccgtatgagcacagagccagtgcttccgctggagctcagtgctgctgttatcaccagtgatagctgccaagggaaagagagtcctcatttgtgtccccaaagccaagtgtgagggttacctctcctgccagccctccctgggagcagaagtgggaccaggaagctggcctcagctgtgtctgagcggcagggcctcacccggccactcccaccataccgcctgctgcgggtctagcctcaaccctgctgtgtggagttggctggaggctggtctctctcagctgatgaggggctctgcggagggcggagcctggagcctgtttctccaggcgcaacgttggggggggtcccctcggggtgatggagatcatctgggtgtatggaactgtgtgtggttggccttacggggtggtcttccttcactgtctgcgggacagatggaggggcacagctgcccatggacccaggctctggggcttctggaaggtgccgaggagggcaggtgcgatgcctgggggcgttcagcaaatgcctggccctgccccctgtgccaacttggcctgggaggctcaggcacagctgtttcaagggtcctttatttcattcctggttcatttcaaagtgtctgtgtcttgttcggagcagcttgggggtagagcccgttgacaaagacgccttcaggcagccaccacggagtgtgcgggacaccatcctcagcagagccctcatcctgaagatcctcatgtccgcggccatcatcatcagcgggaccctctttatcttctggaaggaggtgagcgagggtcaccccggcctgttctccaagccctggtgcggtgcagacgctggggactgcagtccctgccctcctgccacagctcacatctggagaggcaaacatgtatcacacaccggacaatgtgatgccatcagaggcgtggggtgcatgaggcaaagggactggtacccttgaaagaagggaggtcgcccgtgtgtgcctggaactacagagccacggggtggagatgactttgccgagacgggagttgaaatgtacatgaggacaggctgccccctgttcccttgtcaccaggaaacaatttgaaatctgctaaatatcctcctgtgttacactctagaggtgattgtttgctttggatctaggcctgggtcaccttttcatggcctgcaggttcagggagctctatgccaggacgggccacgatctaggtgggaaatgaggcaggtgacccatgtgaccacaccacagattgcccatgtgcaggaagcgggaggggaccctggccgggtaccctgcctccattttccctccagctctccctctactactgacggccatccttcagccttccttgtaggaaatgaccttcactctgggtttaactggagtggcatcacctcccagggagacagttacttcctggaggaagtggtgtttcctccacccataggtgccctgcccccatcctcatggtggcagcaaatcagcatgtgctggggagaccctggggtagcagccactgacctcacacctggaggaagctgtgtgaccgattcatgagcttgtaagtggctcccagccatgccccaggagcagtgaggcaggcctgtgccctttggttcaggatggaggttgtctcttcccgcctaacctctcacctttgtgctcaccttccagatgcctgaagacagagcaagcactccccgcaccagcgacgatgacgttcacttgttttgtgtttttcgatctcttcaacgccttgacctgccgctctcaggtgagacccgggctgaccctcctcgctgcagagctgctgtgtgttctcgacagcagcgtccccgaccctggcccgcagcattgagcggctctggcgtcagcgtgggcagtcagagctcccctgcctgtacctggggtgtggacagcacacaatccccgtgtgaccttctccctgcagaccaagctgatatttgagatcggctttctcaggaaccacatgttcctctactccgtcctggggtccatcctggggcagctggcggtcatttacatccccccgctgcagagggtcttccagacggagaacctgggagcgcttggtgagtggtggggacgggaacgacaggtgacctcgaccagggccatggggggcggcagctgccaggtggggagctgcagcccaggaggggtcagtgcgggaaagcagagctcaccaggggccggctctgtcttcagggcccttctgtcctcacaggaagggactctaacgtgggtgatgtgacggatgcacagaaacccctaggaagaggcctgtcactcaagagtagtagggtctggggcccaaggggcaccggcatcccaggcgtcgggctggaggctcagagcacgtgcagggaggaaggagggagcaaggcctgtactcagcctgggaggtaccccagctggggagcctggacttgaccctggggccagtaatgtgacttagagatctggtcacctgaaggcagggagctggctgtcttccagttttggctgaaagggacatgattcagtcaccgtggttttccaagggcacacgccctggtgtggagcccaggggactccccgacattgtcagccaagcgagtgtggcacctttctctgaagctgcggttatggcaggcatggggcaaggggagggagccagggacaagtcatcgaccccacccttttccccagtgtgctgagagccaaccccaacccggaatagaggacgagggaggccagtgaggcagcccccatgggcccaccgcctccccgccggcagggcccagagtgggtcatggctcagatctggagggtcatgggattatgcatcagacctgaggctgcagtgacaacggtcctatgacctccaggcaagactgggatggtcaactctgccttgtcctccaaaaagcagtgtcagtgtgggtcaccagtgaatgccctgtaggaacagacaagaggaccccccaaaacactctgctcactggctgtttccacccgccgggaaggaagtcggcttcccacgcctgaaggggttgtgcttgggcagcccgtacatcaggaatcatcaacagggagccagggatggttcctcaaaacagcatgtgacaggagcagagggagacgctgggaattcatcccagggaacatgtcgctgggaattcatcccagggaacatgtcggggtgcactggacagggagcccagactggtcactcaggacatttgcaagcagcagggcactgggacagctgctgtagggaaaggaaactcattccccttccagcccgagtccataacatgctcccagctgcctgccagacccaccctgtgctctggagctgcctggtgtttgcctggaaccacaggcaggcccttctggaactgcagcattttggattctgggttaggaagatctccctgccttaggggaatgaaaagggctgtcctcgcacctctcacttnatcaggaggactggcagggaaggcgcttctgccggcgcacagagctgcagcccgtcctgaatctttctgtttctcccttggcagatttgctgtttttaactggattggcctcatccgtcttcattttgtcagagctcctcaaactatgtgaaaaatactgttgcagccccaagagagtccagatgcaccctgaagatgtgtagtggaccgcactccgcggcaccttccctaatcatctcgatctggttgtgactgtggcccctgccgtgtctcctcgtcaggggagacttttaggaggccgcagccttccatcaccggatcagtttttcctcttaggaaagctgcaggaacctcgtgggctccagggcacccaggcccacatccatccagtcgttcccgctggctgtgggacagacagggaggggcctgtacagaaacaccacactgtttattaaatcacaatgatttttattaaccatgtctaactacgtatctgtgccacagcttgcagtgaggcaggccactcgtggcagatacaaggggctcctgagaggcagtgggtaggatggtcacactctgcccattgccctcctggaggccccatttcctcatcataaaatgagggacttttaaataaagtgctatgccgggggataattattttgatgtgtttacctagggtttttaatacaaggggccaggttggaaacccacagccatgtgttaatggccacgtggggtgagcagcaatccatcatgaatggcctacaggaaggcctcggcttttggacataaagagtagggctgggcatggtggctcacgcctgtaatcccagcactttgcaaggccaaggcaggcagatcacttgaggccagcctggccaacacagcaaaaccctgtctgtctctactaaaagtttaaaaaaaaaaaaaaaaacagttgccaggcgtgatgatgcacacctgttaatcccagctactcgggaggctgaggcaggagaatggcttgagtccaggaggtggagattgtaccactgcactgcagcatgggcaacaaagcaagagtctctctcagaaagtggcccttctctccggaaccaggaactgtagtatctcctgctgcctgcagacaagcttgatttcccactgccccaaagacttccaaaaaccgatctgctcttccacgtgacagatggcagaggagagaggtctccatgctgttcttctgcctgaagccacgccagaaccaccaaagggaaccagaaggggaactccgtccccatctctcaggaaataaggccagagctagaaccccccatttactagtcaggcctcactagagaaacagaaccaacaggatggagggagatgcagagatttgttttaaggaactggctcataggatgttgggggctggcaagtctaacatcttgagggcaggccagcatcctggagacccagggaagagctggggatgcaggctggaggcagaatttcctcctcctcaagggagttcagccttttcctcttatagtcctcaactgatcggatgaggcccactcacgttatgaaggataaactgtttgttttacttcaagtctacgggcttacatgttagttacacagcgccatctagaccagtgtttgtttgacgaaaatcaacttggcctggccaagttgtcagataaaagtacccgttgcacccagccacggtagtatgaaaagggtagcaggggtggtaacagctgggtcagacgaagataaggaaggtcagagtggacccctgccagggttccaggcagagtccaaagtcctccatagtaggattcacagcctgggaagaagcccctctctggctacaacctgtgacaccagggccacaggaggagatgcagcgatgggccattcctagtgagacacagacacagggctggctggagaagaaaccttttgagctgtggggctgtcttcctagaagctgccaacccctggaaccactaagaggtcaaggctgaagtgtgccacttccacagtctgctaaggagtgcctccccctgagtcagggacaattcttgctctacttttcaggatccttgggcacactgctggcccgagacatttacttcccatttaaaattaagtaatcaaaataccagggtcgattactctgaactcttgcttatgtaaactttagggataaaactgtagtaagacacaaaatgctaacaataaaatataaattagactacattaaaactaagaccttcttttcattaaggacacagtagacttgaacaccaccattaagcaacttagcttgattacacttgtagaacaccccattcacgagtagcatagaaacagtcaccaaaataaagagcagaaatcaaacgaaaaagcaaaaatagaggaaaatcaatcaaaacctagtttttcgaagagatcaataaaactatcagtcttgcaataagcttatcaaagaaaaaagggaagagaaatgaccaatgtcaggaatgaaaaagtatatcaccacaaacccttcaagatattccaacaataataataaataatactatgtacatctttatgtacctaaattcaatcaattggatgaaataaaccaattgcttgaaaaccaaaaactaccaaaactcactgaagattaaatagatagctgaagttgaaacccttccaaaaaaggcagtttc

SEQ ID NO: 12907 - DNA, 801 bp, Homo sapiens
ttatgttcagtgaaaaaggcagacacagaaagacaaattctgcatgttctcactgatgtatgtcagctaaaaaaaaaaaaaagtggatctcatggaggtagagaaaagaacgatagatactagaggatgggaaggatatatgagtgggagggagggagcaagagatgttggctagtgggtgcagggagccgaaggcccgtgggacgtgaccaactcagcattccactggaggctgtgtgatcaaacagcaaactgtttatcatgaatgcaggatgtgggcaaactcatgactgctcctgccaacaggtttgctggaggcgatcactccctgtcaccaaggttatctactgcgacatctagagcctgttgtttgaggaatgcagtcttgcaagcctactccggactgagcagctgaccccttcttccaccccccttctcactatgtcttttgcataacaaatacggagggctgtgtaaagttcagggcccttgtccactagaggcaaggtgccccctgaccccttcttccaaacatactcttttgtctcttgtcttttattcccatgttcgccccctttgttcggtccccctaggtccatgaggattacttagttgcaccccaaacagcaacagaaccgggtgccccacaagtgggtacaaacatacagttagaagagataagttctcatgttctatagcagcactgggtgaccagagtcggcaacaatgcactgtgtatttcacagtagacataagggaagacttgcaatgcttggaatgtggaaaggatactcaagttga

SEQ ID NO: 12908 - DNA, 290 bp, Homo sapiens
ccaacacaacattcaaatttaaagaggaaacagtatgggaaattcaggcaaaggatacagaaaattcattatattaacttaccacatgaaaggacacaaaacctcagtgattccaaagagtagatctaatatagatgacttcttggtcgggcatggtggctcagacctgtaatcccagaactttgggaggccgaggcggttggatcacttgaggtaaggagtttgagaccagcctgggcaacatagcgaaaccccatctctactaaaaatacaaaaattagctgggcatg

SEQ ID NO: 12909 - DNA, 2836 bp, Homo sapiens
gggccggcgtcgggcggggccggcggggtcttcagggtaccgggctggttacagcagctctacccctcacgacgcagacatggcagcgcagaaggaccagcagaaagatgccgaggcggaagggctgagcggcacgtgagcgagctggctctaggccctcggaccagagacccgggagtccgggcccccggccccctcctccctcctccctcgagagcctggagtcccagccccgagccgcagaagtgttggccccggtctcctctaatgggaccctggagtctgggcccctagtcccctccctgcctgctgtacaggaatctggggtcccgggagggagtccaggcacccttagtccccttcttttgcgggggtctggggctccatcccggtccaccactgacccggccccaccccccgcaggaccctgctgccgaagctgattccctccggtgcaggccgggagtggctggagcggcgccgcgcgaccatccggccctggagcaccttcgtggaccagcagcgcttctcacggccccgcaacctgggagagctgtgccagcgcctcgtacgcaacgtggagtactaccagagcaactatgtgttcgtgttcctgggcctcatcctgtactgtgtgtgagtgcctcccgggccccgcacccgcactagccccgaccggctggacccctcctctcgccgctcaggccccgcccttcaccgcccggtccctcctctcaccgcccagggccctcttctcaccgcccaggccccgcccccaaggattggctctgctagactaccttgtcaccaaagggccaggtcccctaccccaccatcaccctggccaggatgcagtgtgactaaatgtcacctggccctccctggtctccaggatgtagcttgccgcccgccggtggagaaggccagggccgtcgggctggcccagccccagctgtctaaccgctgcctccctgcactcctcctccagggtgacgtcccctatgttgctggtggctctggctgtctttttcggcgcctgttacattctctatctgcgcaccttggagtccaagcttgtgctctttggtgagaaaccccctgcccagatgaatccttggtccctcaaatcttggtcttttggaatgcagacagacctcagaccccaaatccaagtccttcaaaacccaagtccgcccaagcctagatgtacactagatcccccaaacctgatcccttaaaatctcagacacaaccgatccttccatcgagtctcagccccctcaaattgctattcctcaaacccaggatccacctggctgctgtgccttaaacctactccttttcaaaccacatgactcctcccctctctctcctccccttgccgctctctgcggccaacatcagctgcaggtgcccacactggacaccaggtggccaccttacactggcctagatctgttcccgtttcttttcctgctttctggggtgtgaccagaaagaacttggaacttagagagggaagccgaggagtatgtttcatgtggttcccagactagtagtaccaaggaccactgggaaaacaaaatgccaggggaaattccccccaggggaaaatcaaggtttggagtggggtcagggagttgggattggacagttaggtagacctgaaggccaggctcttcaggggcctgcaagttatgtgcttgatgggctggggtggagggagtgcctgaagcacaggcacgacttggcttcagctgatcaccgtcaccagagcatgtagaccccatccctgagacttctatgagaagcctgaagttggtatttttatgtgaaatcgttcactttgccagccacaaatcacatccttgcaaaacagctcaaaaaacacatccacaggtcagatttggcccttgggccaccagtttgagaccctggtctgcgcgagggttgcagcaggagagccctagtctagggagcaggaagccgggatcccaggaacttcctggaggatgtggggcagagggcagagggtggggctgaggcaggcgaggacggtgtgctgtgttctggagggcagtggggacagcaggggaacagggtgaccccaggacctggagggccttggcatgaggagtttggattcgatcccgagaacctggagcttgtacggattgttggggggcagcaggggttactctgggagagggcatggagagtcggaacagcaccccaatgccatctgcccccaggccgagaggtgagcccagcgcatcagtatgctctggctggaggcatctccttccccttcttctggctggctggtgcgggctcggccgtcttctgggtgctgggtgagtacagggtctgagcagctggggtggatggtgggagccaggtgcaggagtgtggccctgagctgccggctttcctgcaggagccaccctggtggtcatcggctcccacgctgccttccaccagattgaggctgtggacggggaggagctgcagatggaacccgtgtgaggtgtcttctgggacctgccggcctcccgggccagctgccccacccctgcccatgcctgtcctgcacggctctgctgctcgggcccacagcgccgtcccatcacaagcccggggagggatcccgcctttgaaaataaagctgttatgggtgtcattcaggaaatattcccccagcatcttctgtgggtctctatgggtggagctgggaatactgcacagagcagggttggggtggaacctggggtgtgggcaagacgatgacaaggtaaacaggtaaaatattatgggatgcccaatggtggtgagtgtt

SEQ ID NO: 12910 - DNA, 167 bp, Homo sapiens
aaaaatacaaaaattagctgggcgtggtggcgggcgcctgtaatcccagctactctggaggctgaggcaggagaatcgcttgaacccaggaggcagaggttgcagtgagccgagattgcgccattgcactccagcctgggcaacaagagcgagactccatttcaaaa

SEQ ID NO: 12911 - DNA, 591 bp, Homo sapiens
cactcacagctctgatttactctcatcaaagggtatggagccaagtcagccaaaaggaaaggtgcatggagtgaactcgggaaaccaggcatgcacttccagaggccacacctaattcctccagcagtggatcatggtgacgtgtgaaatgtcagccagggacactctgatcctagcctcagcgcccttggtttcatgggggcggccacaagagcaccttctctccaacatataccaaaatgccaggctcccagaaagaaggcctgtgcctgcacgaacagcctagatagatgcagcaagccactctaggcctgcacgaacagcctagatagatgcagcgagccactctatcaggaagtgataagaccccccccccaacacccaagttcccagccaaggaccaactgtgcacccaggcctgtctaaggacagcagtctgttgtggagcctgccaggttaactcttttctgcacagagaaagttcgggaatgagttgtgggttaaagagggtgaccagaaaaggcctccctgacgtgacattcaccaaagacctaaattgagagagggagcagcccagatcctttggaggaa

SEQ ID NO: 12912 - DNA, 2110 bp, Homo sapiens
  SITE (847): n equals a,t,g, or c
cgtgcccagcctagtcatgactcaactgggatctggcacactgcactgggtgttttgttctctgatgtgcacattgatgaatgcatattggtacaagggaaatgaatctgttttcagccatttaaaaaattgtgttgtaaagcaaacaaaaatagcttgaacatttaaaaattactgtttaatattgtttgactgattttctaagaattatgtgaacaatgatgagtccagggcagcagccatcacaaatatgacagtccagcaaggcccatggaggtccctttggaagggacttgcacagctgattttctttttccagtgttgtttttacgggtgaaacgtggcttttgaaatactttagttgtttggcttagagctcccactttccccctaacatagtgcctgtctgttttttaaaacattttacccttcggcactattttctgctattcccattaatattatgtaacataaaccacttgctactgatttgggcatattacagactacaattactagttgctttgaatgcattggcactcttaattattgcaaaggagaattgaaaagtagtcttgtggtcctagttaatttagctttgggcaaactaagtggcttttcttctgtcctcttctcaaaaggccttttaagcagcagagactgggctaaatactggaactgaattccacttttctgcctgctcatttgctgccaaagaccacttggggctccttgtctagaatgctctaagacgaaatttggccagacacagggttccttgattgttctgttcaactaatagagaacctacattttgccttcttaatatcgactttcttttgtaccnaggtttttctttctttcttttttgccttaggagcttagctcaaagttcagctaacctttgacactactagtgtcatttagtaacagtaatctttgacactactagtgtcatttaggagcttagctcaaagttcagctaacctttgacactgctagtgcgttcaagaaagggtagggaatgaagtacccttaatgcagggtcagcaaacttttcctgtaaaaggccagataggaagtatttttggctttttgggctgtttgcttttgctactactactgtgggaatgaccatggtcatggctgtgttccagcacaacttgatttaccaagacaagctgtgggctgtatttggtcctcaggctgtggcttgctagcccctgctctaatggattgtgttggcggcaatggcaagattcccttgctgagaacatgcagatgaataaccttatagctgggatgcagagaggagaaagttctgtaggtaataagtgcactgtattccctctgagctacttcctgggcatagttacatgtatggccagtgtgtgtacttgagccatcaggctcagacacttgttgaatatacctctcattgcattagtttgtaattgtgctagtgctgggtgctgagctcagctgcccggatgacctttccagactgaaggacatactcccctaacagctgggagtgctgctggctggccatttacttccagcccttatgaggagtttcccctgctgaagagccctgcctgccccagatcatacccccttcctgcctgtaacccttaccggctccatatggggtacaaagggctggcctcctcaccccaacttgggaaaccctctggggccatcccagctccagagccccttgtggggtcagtgagacctcattgtggccacattacagcccagtgcctctccctgacaagcctgtacccagccggctcagcccacagcactgtcctatgaaccttcctgcacgccattctccacctcagtatctgctttcggggaacccaacctgcgacagtgcttctgtgtgttttcagtcctgcaggtttgaactctgactttggagacttttccagttatctcgtggaatgacagattgtgcctgtatgatatcaggcacaattaatgcaaattaggcagacctatttattctagatgtgaatttgctatttattttaaatgttgattttatgtgttatgtgactctgaacttattgccaaataaaagtttgaattgtatcatctg

SEQ ID NO: 12913 - DNA, 696 bp, Homo sapiens
gcaagtccaagatcaaggtgccggcagatttggtgtctggtgaggcctgtttcctggttcacagatggtgacttctacatggtagataggttgagggagctctctgaggcctctattataagggcactaatccctttcaggatgcccctcccccttaatcacctcccaaaggcttacaggctcacttaccaccctcctagtgttatcaccttgggggtaaagatttcaacacaggaattttgggggtcacaaacattcagaccatagcacttaacctttattttaaaatgtcagccaggtgcagtggctcatgcttgtaatcctagcacttagggaggccaaggtgggaggattgcttgagctcaggaatttgagaccagcctgggtaacatagtgaaaccccatctctacaaaaaataaaccacattagttgggtttggtgatgggtgcctatagcagcagctacttgggaggctgaggctggaggatcacttgagcccagaaggttgaggcttcagtgagccatgattgagctactgcaatccagtctgggtgacagagtgagaccctgtctcaaaaaaaaaaaaagtcaattatttaaaaactcattagtcaaatattttctaagatccaaatttgttttaagcaattataattgtcttcattgtgtcttctattggaattgtagctgagatt

SEQ ID NO: 12914 - DNA, 3146 bp, Homo sapiens
cccctgctgcgtgagaggtgtcggcggctccgggccgggatcgaggtggcggggcgagggaaggaggtggggcgcaggctgcattgcgcttctgtccggggccctgggtcagaggggccggcggacgaggcctcgggtccgggcttggggagggggcggtctgcggggtcggattgagggccgggaacccgcggagtcttgcccctgggcacctgtggggccgagatcccgagccacctgtccacacacccccttcccccagtgccctgcgttgggtccagctggccccagacctaggcctttcccagcctcgggcgattatagtttatttgaaaacgtttgatttttgtgttaatgattcttttactaccgccgtgcaacagttgtgtaaatgtggtcgtgttacgccatcgtttttacttgctcctaagaagggccttaccagctcctgcgattatctcacgcgatgattcttggtagctcgtgaaaaaaatgcataacaagatactggttctcaagggaccaaaaccccacccccacctaaaggaaatagcttgtttttgtttttcttttttacagcaatatgctacgtgtggggagggggagggacgatggaggcagcctgtagcgatctcatcctcgagagaatctgctaacaatttggggggtatctttccttcctttttaattaatacacaaacatatatacgtgtgttacataaggggtgtttatttgcttttttcacttaatacgtggaagaccttttctctatcgtttgaacctaaagcctagaaggcaagaaagcaactcgttagagagttgataaagtatcactgcagtggccagtgatttggatagaaataagctgaattcagggtaagaactggtttctataaaatatggtttactctgcataataattggaggcagtgttttttcaaactgagttttttcagccggttcgtgaatggtgaaattaatttagtcatgactagcatttaaaaaaaaataagatcgcataaaaaaatcagaatgcattatatgtaatgagagtattgttttgtgaaaaatattttaactgtgcgcgtgtgcattgtgaaatttagtgggtcgtgactagcattaaaaaaagtaagatcgcatagaaaatatcagactgcattacatgtaatgagagtattgttttgtgaaaaatcttttaagtgtgcgtatgtgcctgtgcgtgtgtgctcggttgtaattaaaaatttattggttcctgtgtgtcatgttaaataatcttgagagtcgctaatccaaggtactgtcagcactcaaatgagcaagatgcaattaaactagacattagttttattttttctttggaatagtggtgatgttgattgcagcaaataagagtcctaattatttgttttcacctaatattaaaacaagtagtattcctaaaaatacagagaggaagtgtctaagtcgttaagaggttaaagcataaactactcaaattgaccagtgatcacatctcagttacgctggttattggtgtgagacctgcaacaagatacctcttttctctcaacctcagttccctgatttgttaaatgggaattaatcatggcagctaccttataaagctgtttgttatttagatgagataatgcacaggaagctgttgacagagcgcctggctcagattaagtactaagtattagctattattattttattaagactgaatagaggtgtctaggataatgcttgtcaccagaggaaagccagcatagcgtggataatccagaaaaggggaaaattgaaaattagtagtgttgtgtggaggaactgacactgaattagtgtggtctttttatgcattcggccattgttttgtcattgctcctcaattgtttccctactgctggacggaaaatttagattgtcttattcagaaaaccaaatgcctttctattgtctttccttattattattatttttcaaattaagttgatgtctcttttgtcaggcagttgaaaaatatgttttatgaggattgtgggttttgttagttcttaccacactgccacgccacactcagtttgagaaatacacacacgacaactccagactcatttcagaaatatttttatccatgtttacctctgcagctggtgcagatctcaggtgtgcaagaaatatttctttaaaaaaaaaaaaaccaaaaacaaaatgctgttttatttgtattttaagacatttctgcctaagtcatctgggtagctcagaaatctctgttcactgcctgggataggtttatgcaattttaaatgttacataaatgaatgaaataagaaggtgaacatagtcattttttaaaaatagcattattatttttatgaaaaataaatagaatgctttggattcataaaaaggctatatttgcaaagtacttaactgggtatgacattggggaaaaatgtttaacattgatgataattctgctctcagatttgaaactgccttcagatttttgttctgctttagaggaacaaaaatggaaactcgggtgaattacgatgttgtttgtgaaaagacatgtctcgaaactctagctaatctgtccaaaaaaaaaaaaaaaagcaacagtccccatactaaaaataccaatgaaacaaaaaagccccatttgatcttaaacatatatacatttagaagttttaagttaaatattaaggttatgtgtgcatttaaaaaattatcttactgattgactttaagaagttaacccaccaactactggttcttgtcttgacagggcttttatctacactgacaaaatgaaatactatgcaatcattaaacattctattttattttactctattttctcctattttatgatagcattttataatggtatatgaaggtgctcattatatgtggttcagtgagagagggtggctatagaatagaatgtactgtaccttcccatttttgtaaaaatatgtttagaacaaagacgaatacgatacatgttaatggtgggtagattatggctgatttttatgctctttatttttataattgtactattataaatgctttacttttgtaataaaaattaataaaagtcattttttaaagaaaaattaaa

SEQ ID NO: 12915 - DNA, 9880 bp, Homo sapiens
aggagagccaggtcctcctgactcttacaaatccagttgagaacctcacccatgtgactctcttcgagtgtgaggagggggaccctgatgatatcaacagcactgctaaggtaggagcattttgcctcagcctgactgacccgcactttccctggagtgtcctcatttgacctggcttaaaagactccacacactctcctttccacatctagtcagcaagttcttttgattccacctcctaaatttttttactttatcctgaaacacactgccctatttgaaggtctcatcgtttcttacctggacagtgacaataacttcctaaatgaccttgctatttttataccaccacctctgtttcaacccatttcttctctcttgccaccagggtgatacttctaaaatctaactctgtgcatgctggtcatttagcattgctcttgactgagatgaagtccagatttttggcatagcataagagctgcttaatgacattacttctctgttcttccagtgtggtcttccttcagatcctcaaatttagcattccctgaatcgtacatattagtggttgtgatccagacagatccaatgggttataaactttgacactggagaattgtgtatgctattcattttacttagcatgcctccttcctatcctgactcccctaacatacatgccccttcagtctctcagtctcatacattcattcttcaacacttgtgaaatatcatttccttttagaaatgatacgtttaaaatcatttagaagctggtatgcctcctctagattcctctaccttacaaagagtatacataacatagcactaactagtctgggcttggtggctcacgcctgtaatcctagcactttgggaggccaaggtgagtggatcatctaaggtcaggagttcaagaccagcctggccaacatggtgaaacccgtctctactaaaatacaaaaattagccgggcatgatggcagatgcctgtaatctcagctactggggaggctgagatgggagaatcacttgaacccgggagacagtgattgcagtgagctgagatcgcgccactgcactccagcctgggcggctgaggtgagactccatctcaaaaaacaaaataactaaatgttaaagtaggtgattttgactcagtgtgagttgaatggatgtaatatggcctctctttatattttgctacttctagtacttgaaattttagaacaagagcctttctctatagatcatctattactaattcataattcagcatgatatttataatagaaatggtttaaaaagatgcctatatctttagttcttattcaaataatattagagaatttctgtcctctttttttttttcttctgctttttaatgatttcacttactagcatcacctccaaagagagataacacttatttcacttatttggtccttgttgcttttttttttttgagacggaatctcactcggtcgccaggctggagtgcagtggcgcagtctcggctcactgcactctccgcctcccagtttcaagcgattcccctacctcagcctcccaagtagctgggattacaggcgcctgccaccacgcccggctaattttttgcagttttagtagagacggggtttcaccctgttggccaggatggtctcaatcgcttgaccttgtgatccaccttcctcgggctcccaaagtgctgagattacagatctgagccactgtgccctgacgttcctttttttattaacactaataagcagctccagttaagacagacagaaataagtacctgatgcataagcacagcatatctttataaagctctctttatacctcccctcccacatttgtatctataattagaaatttgatcaacactgttaactgttaacctctgatagagcaaagttgaggcctaattacaacataagtctgaagaatgctaattgttttccatgaccataatcacccagtatctcatgtaagtttatgtatcaggtaccaggaatcagctggtaccatgtcaaaaaacattgtgttggaaccagtgtttctcctttgtgttgttcttaatgatggactgtttcagatgtatcaaaaaaaaatgaggaataatatggcaagtacccatttctccccatccccttaagaaattaaacattagggctaggcgcggtggctcacgcctgtaatcccaacagtttgggaggccgaggcaagtggatcatgagggcaggagttcgaaaccagcttggccaatatggtgaaaccccgtctctactaaaactgcaaaaaattagccaggcatggtggtgggcacctgtagtcctagctactcatgaggctgagtcaggagaatcgcttgaacccaggaggcagaggttgcagtgagccgagatcatgccatttgcactctagcctgggcgacagagtgagactccatctcaaaaaaataaataataaaataaaacattaaagacacaattgaagcccccatgttctccccagttcctcattgcagaccccatgaagtaagtactaacttagctttctcttaaaacctttgttcttataaactccatagaagtagtatatgtttcctgaaacttgctgtgtgcttccatttgtctaaatcaatgtcgtactttgctatattctgtcacactggtcccttctcaggcaggcctctctgtgttgctctccaggtggtggtgcctcccaaagagctcgttttagctggcaaggatgcagcagcagagtacgatgagttggcagaacctcaagactttcaggacgatcctgagtgagtgatctttttgtgatccccatacaacaaatggctgataatagaatgcccacttatatccagttttcttgtctggattttttaaaataacttttttcttcctgtttctaaaaataattattgtagaaaattggggaaatatatgtaagaccatgaagaagaaaataaaattatcccaccaccagagataaacaccattagcattttggcatttgtccttccaaatatttctcacctcattgggatcattctataaatacagttttttagcctttttcacttgaatatattttcccatgttaataaagaaatttttaattatatgattttaatggttgtggacaggatacaatactctgtccctagagattgatcatcgggtttgttccccacccccacccccttggaggaattaatagattttactctctcatatctaataactgaaaagaaccaaaccttccagtaactggggactgtgaccatcagagaattcagtctgtagactgaatgttttcaatgattcgaacagaggatttaatataaataattgttcacttgtgtaacttaaaaagtgaaaaagaacactgaagtagcaattttatgctacttcatgggcataaaatttcaaagatagctatttgatgagccagctaccaccccttaggtggagggaacaaagggaaatagttagaattattaaaatttagaacttaaacaaagagctccatgtagctgaaactcaggcctccagtgagctgaaggggaacactgcttgcgtggtcctggcatctcgtgatggcaaaggaggggtggcatgattatacaagaattggaaaacttcaactgcttactgccacttcctcctgggtaaagaagcattgctgggccgggcatggtggcttacccctgtattctcaacactttgggaggctgaggcaggaggattgcttcacaggagtttgaaaccagcctaggaatagagttaagactccgtctctacaaaaaaattttaaaaatagccaggtgtagcagcgcatgcttgtagtcccagctactcaggataccagggtgggagaatcagttgagcccggtaggctgaggctgcagtcagctgtgattgtgactgtactccagcctgggcaacagagtgataccctgtctcaaaaaaaaaaagacatttttggagtgatggccacagggaacagggaccacaagcaaacaggaatctctaaaggaagagcaagacccttcctcctccagacttctagtctccctttagagcccgctgctgacagaacctgacaaagagccatccgatccagcagatacagtccaagcagaatcctgtgtcacaaagcaaaattgagagaggtgcgcttggagctgaaaaataatagcttagtaaactggcacagggaacattcacagtctttgttttgtttttagagaaggagtctctgtcgcccaggctggagtgcaatggcgtgatctcctgctcactgcaacctccacctcccgagttcaagcagttctcctgcctcagcctcctgaggagcttgtattacaggcaagcgccaccacgcctggccaatttttgtatttttagtagagatggggttttgccatgttgcccaggctggtcttgaactcctgacctaaagtgatccacccgacttggtctcccaaagtgctgggattacaggcgtgagccaccatgcctggcccatttacggttttttgacagaatgatcaaaagctttctcaacaagatattagagagaagagataacaaggtgggttagaaaaataaagtgaagccaggtgtggtggctgatgcctgtaatcccagcactttgggaggctgaggcaggcagatcacttgaggtcaggagtttgagaccagcctggccaacatggcgaaatcctgtctctactaaaaatacaaaaattagccaggcgtggtggcacgtgcctgtaatcccagcttcttgggaggctgagatgggagaatcacttgaaccctaggggcgggggttgcagtgaactcagatcacgccactacactccagcctgggcaacagagccagactccgtctcaaaaaaaaaaaaaaaagaaaagaaaagaaaaataaagtgaaggcaaaggtgagattagtttagtgataccaaacgtgggttaacttcagaaagcaccaggtcaagtgttgttttgttttgttgttcgatagcattccagaccctaaccccagaggattttttttagcaggtctagctagggaccagaaatccaaatttgttttggaaaagcttcccaggtatcagtggttgcctgggaaattaaggataaaaagaaagactgatgtttttctttttaccattttaaactgtttgaattattttttacatgactcatacaaatcaaaggtctggttagttactgtaatacaaaatgtgctgagttgtacagtacaaaatgtgttctctcaaatccttgctttatgtgggtcctcaaattaattaggtacagaaatttgttaagccaagatatacttctggaatgattgtctgagatatcagatttcagcctgattacatgatagagtaattaaaaactgaattaattatattttacattattagatttaatagaactttcagatttctggaaactaacactgtataaatatgtaaatatgtaatcccagtaacctttcttagagtaactgaatgtcatttgggtagtagacaaattctgtttatttcattgcccttttactttcagaaactaagttattaaagcacaaactgtatgcacaaatgaggggaaattgaaatgcaaacctcaatgaagagacatttttgtgctaaaattcctaattacataagttatttacaaaaacattcttgatttatggtgttccaaaatttcccttaaagcactgagttattaaaacttcccacagtatggccaggcatggtggctcatgcctataatcccagcactttgggaggccaaggcagaaggatcatttgagcttaggaggtcaaggctaccatgaactatgatcgtgccactgctctccagcctgggtaacagagcaaaagccttgtctctaaaaaataaaaataaggccgggtgcattggcttatgcttgtgatcccagcactttgggaggctgaggcgggtggatcacctgagatcaggagttcgagaccagtctgaccaatgtggtgaaaccccatctctactaaaattataaaaattagctgggcgtgatggtgtgcacctgtaatcccagctactcaggaggccgaggcaggagaatcgctggaacccaggaggcggaggttgcggtgagccaagattgcgccactgcactccagcctgggtgacagagcgagactccatctcaaaaaaataaataaataaataactttccacggtatgagtctatgttctatagaaatattgcatttgcacagaggtaaatgtaaagggatgtttgcagcaccattgtttataatagagaaaagttgtcagcaacctcagtatatgccaattatggtaaacacataattgaatactgtgcaaccattacatagattgtagatgatctgtatataccagcgtcaaaaggtgtttgtgataaacagagttaaaaaaaagcaagttatggaatagtgtgtaccatctgtgttggttagaaaagcagaaaagtataagctcatagaaaaatatatggccaacgtgttggcttatgcccgtaatcccagcacttttggaggccaaggcaagcagatcacctgagccctggtgttcgagaccagcctgggcaacgtggcgaaaccccatctccaccaaaaaatatacgtattaatatataaagctagccaggtgtggtggtgcatgcctgtagtcccagctactcgggaggctgagatgggagagttacttgagcccgtgaaacagaggttgcagtgacccaaggtggagccattgcactccagcctgggcgacagagcgagactgtgtctcaaaacaaaacaaaaaaatacttggtaggttaagaacaaagtgtttataggttttctgtgtgtgctgaaggaaagaataaggtgaaagacttttactgtaagtcttagtggtttggctgatttttttatctacctaatacttgcttttttttctttccatagcattatagccttcagaaaggccaacaaagtgggtattttcatcaaagttacaccacagcgtgaggagggtgaagtgaccgtgtgcttcaagatgaagcatgattttaaaaacctggcagcccccattcgccccattgaagaaagtgaccagggaacagaagtcatctggctcacccagcatgtggaacttagcttgggcccacttcttccttaaaaggttccactggagggcagatcccaaaggacagtatcaccgtaaacctgcgttaaaatgtggaagctgctgcttcattaggccttgtttataacgatgtacccatgcactacggaattctattgctaagaaagtgggagcataggcaaggcattgggaacacagggtagctgctgttgctcttgctctcacccctgttgacaccagtaagtctgtgtctccctcactgaaccctgcacgttgagtaacagcagcataattccatcctaggaaaggggatgggtgttccttggaatggcattgtatttaccacctgagaaactctgtactgtctcttgatctgatctcactaaggatcacaatgtcacagatgaaacttaaatgataacccaaaggtagacctgctgttaatgatccagcattggtcacaatgtaccaactgctttctgcattccgttaaatatcatctaacagtctaaaacatatcccttcattgccataatggctgccattttgccatagatttccatataactgaaaaactgaattgtcactttatctttagtatcatgatgattggaaaaacctgtgaagttgttaaggcactctcatttgccctctttttctaagtgaatacaggacacgtattagttgttcttaatttttttcccagtaaaatatggatcttttaagaagaatttgagaagcaaacaattacatgtcatgtcaagggggtagcagattccattcgttttcaatattgccacaatacccagggattaatgctgccacaggggggcaatctttatttgtcttacttcctaccccttccctgttctgcctctttaactcagttaagttgttctgtttgggacctggaaaagaacccaaagaaaacctgagtggacaggttcatttctggaatgcagaaaacattttaaaggctagatttttagaatattctcaactagcattctttccattgatttgaaggggaaattaactattataatctcttgaatccaaaactggatattaagaactttcccccttactaagtttaagacttttgtcatgtggtgagtcaaataagaccattttgattgtaaaccataaaatagttcagcaagtagcccacagttctggcctaacagcagacttgctgttttcacttggtatcctggagttgggttgctaaccttaatttctatgatgttttctaaaatgaaacttgataaagtagaccaccagctgcaccgtgttttctgtaaaagtattgttagtaagtggccaagagacttgaggaaaatacagattttttgtttaccttggtcttgttttaagtcttaaaaaattaaagataacattataatgtagaatacagatgggacatagtccttgtaagcttcccttgaaaatgttttaaatatttaggaagcttttaaaagacactaaattgtactctaaaagacactaaattgtactaattgtacaaaggtcaagccaattttatgaaacagtcctacagagtaatatatgtgatgcagtgtaagaaggaaaatactcatctctaacattatggtaataacatttagcctcttaggagttggagcagggggatgggtaattacagatttgcagactatagaaagagtttcatttttttgtgaccccacagagtctcaaatttttatttcactacctgctagagcctactgtgaaatcactgctccatatttgccagtggaggaaatgggcatagagtagagaatagcttcatatgtttacacgtttgcatagactacacacatgtcatgcgtttatggcaggtagctggtatttattccccaaagtaataatgttgaagtatgggtctcatcattcccatacacagaaacacaaaacactttgatcataaacttttttcttcagaagccaaactaacttgcagaataatagagccactggtttaatgtttcctcaagataggttttagtgtaagctagtattctgtgtgttcgtagaaatgattcaatacctgcagctggtgaattaggaattgtatttgttgccttttttatattagatgaggtgcaaaaattttaatgctagtcagtatgcaccaccacaggaaagttagatcccattagcacttgaaactacagctttggaaacttaggctaagttaatttggatttgttacttgattcacctactgaccttttcttttgtttgaagtgcttatcagcataatgagctaagtgtcatgcatatttgtgaagaaacaccctttttggtcccttttgggacagagaggtactccttgatctttatgaatgacaggttactgttttgccttattgcttaacttaatgtagtgaaataaagcagacaaagcttgagcgtgtcttttgtttgctctcatgtagatactaagtagcatggctcagagccaaaagacaagcgtgaagttaagagagttggctaagagagttggtggggcatgctcccttccattccttaaatgaagtaatctaaaatctcttagcaggttagttcaccataatatataagtagatgttgctttgagcttcttatatacatattcacagaaccattatataaatgttgttagacctcta

SEQ ID NO: 12916 - DNA, 9879 bp, Homo sapiens
aggagagccaggtcctcctgactcttacaaatccagttgagaacctcacccatgtgactctcttcgagtgtgaggagggggaccctgatgatatcaacagcactgctaaggtaggagcattttgcctcagcctgactgacccgcactttccctggagtgtcctcatttgacctggcttaaaagactccacacactctcctttccacatctagtcagcaagttcttttgattccacctcctaaatttttttactttatcctgaaacacactgccctatttgaaggtctcatcgtttcttacctggacagtgacaataacttcctaaatgaccttgctatttttataccaccacctctgtttcaacccatttcttctctcttgccaccagggtgatacttctaaaatctaactctgtgcatgctggtcatttagcattgctcttgactgagatgaagtccagatttttggcatagcataagagctgcttaatgacattacttctctgttcttccagtgtggtcttccttcagatcctcaaatttagcattccctgaatcgtacatattagtggttgtgatccagacagatccaatgggttataaactttgacactggagaattgtgtatgctattcattttacttagcatgcctccttcctatcctgactcccctaacatacatgccccttcagtctctcagtctcatacattcattcttcaacacttgtgaaatatcatttccttttagaaatgatacgtttaaaatcatttagaagctggtatgcctcctctagattcctctaccttacaaagagtatacataacatagcactaactagtctgggcttggtggctcacgcctgtaatcctagcactttgggaggccaaggtgagtggatcatctaaggtcaggagttcaagaccagcctggccaacatggtgaaacccgtctctactaaaatacaaaaattagccgggcatgatggcagatgcctgtaatctcagctactggggaggctgagatgggagaatcgcttgaacccgggagacagtgattgcagtgagctgagatcgcgccactgcactccagcctgggcggctgaggtgagactccatctcaaaaaacaaaataactaaatgttaaagtaggtgattttgactcagtgtgagttgaatggatgtaatatggcctctctttatattttgctacttctagtacttgaaattttagaacaagagcctttctctatagatcatctattactaattcataattcagcatgatatttataatagaaatggtttaaaaagatgcctatatctttagttcttattcaaataatattagagaatttctgtcctctttttttttttcttctgctttttaatgatttcacttactagcatcacctccaaagagagataacacttatttcacttatttggtccttgttgcttttttttttttgagacggaatctcactcggtcgccaggctggagtgcagtggcgcagtctcggctcactgcactctccgcctcccagtttcaagcgattcccctacctcagcctcccaagtagctgggattacaggcgcctgccaccacgcccggctaattttttgcagttttagtagagacggggtttcaccctgttggccaggatggtctcaatcgcttgaccttgtgatccaccttcctcgggctcccaaagtgctgagattacagatctgagccactgtgccctgacgttcctttttttattaacactaataagcagctccagttaagacagacagaaataagtacctgatgcataagcacagcatatctttataaagctctctttatacctcccctcccacatttgtatctataattagaaatttgatcaacactgttaactgttaacctctgatagagcaaagttgaggcctaattacaacataagtctgaagaatgctaattgttttccatgaccataatcacccagtatctcatgtaagtttatgtatcaggtaccaggaatcagctggtaccatgtcaaaaaacattgtgttggaaccagtgtttctcctttgtgttgttcttaatgatggactgtttcagatgtatcaaaaaaaaatgaggaataatatggcaagtacccatttctccccatccccttaagaaattaaacattagggctaggcgcggtggctcacgcctgtaatcccaacagtttgggaggccgaggcaagtggatcatgagggcaggagttcgaaaccagcttggccaatatggtgaaaccccgtctctactaaaactgcaaaaaattagccaggcatggtggtgggcacctgtagtcctagctactcatgaggctgagtcaggagaatcgcttgaacccaggaggcagaggttgcagtgagccgagatcatgccatttgcactctagcctgggcgacagagtgagactccatctcaaaaaaataaataataaaataaaacattaaagacacaattgaagcccccatgttctccccagttcctcattgcagaccccatgaagtaagtactaacttagctttctcttaaaacctttgttcttataaactccatagaagtagtatatgtttcctgaaacttgctgtgtgcttccatttgtctaaatcaatgtcgtactttgctatattctgtcacactggtcccttctcaggcaggcctctctgtgttgctctccaggtggtggtgcctcccaaagagctcgttttagctggcaaggatgcagcagcagagtacgatgagttggcagaacctcaagactttcaggacgatcctgagtgagtgatctttttgtgatccccatacaacaaatggctgataatagaatgcccacttatatccagttttcttgtctggattttttaaaataacttttttcttcctgtttctaaaaataattattgtagaaaattggggaaatatatgtaagaccatgaagaagaaaataaaattatcccaccaccagagataaacaccattagcattttggcatttgtccttccaaatatttctcacctcattgggatcattctataaatacagttttttagcctttttcacttgaatatattttcccatgttaataaagaaatttttaattatatgattttaatggttgtggacaggatacaatactctgtccctagagattgatcatcgggtttgttccccacccccacccccttggaggaattaatagattttactctctcatatctaataactgaaaagaaccaaaccttccagtaactggggactgtgaccatcagagaattcagtctgtagactgaatgttttcaatgattcgaacagaggatttaatataaataattgttcacttgtgtaacttaaaaagtgaaaaagaacactgaagtagcaattttatgctacttcatgggcataaaatttcaaagatagctatttgatgagccagctaccaccccttaggtggagggaacaaagggaaatagttagaattattaaaatttagaacttaaacaaagagctccatgtagctgaaactcaggcctccagtgagctgaaggggaacactgcttgcgtggtcctggcatctcgtgatggcaaaggaggggtggcatgattatacaagaattggaaaacttcaactgcttactgccacttcctcctgggtaaagaagcattgctgggccgggcatggtggcttacccctgtattctcaacactttgggaggctgaggcaggaggattgcttcacaggagtttgaaaccagcctaggaatagagttaagactccgtctctacaaaaaaattttaaaaatagccaggtgtagcagcgcatgcttgtagtcccagctactcaggataccagggtgggagaatcagttgagcccggtaggctgaggctgcagtcagctgtgattgtgactgtactccagcctgggcaacagagtgataccctgtctcaaaaaaaaaaagacatttttggagtgatggccacagggaacagggaccacaagcaaacaggaatctctaaaggaagagcaagacccttcctcctccagacttctagtctccctttagagcccgctgctgacagaacctgacaaagagccatccgatccagcagatacagtccaagcagaatcctgtgtcacaaagcaaaattgagagaggtgcgcttggagctgaaaaataatagcttagtaaactggcacagggaacattcacagtctttgttttgtttttagagaaggagtctctgtcgcccaggctggagtgcaatggcgtgatctcctgctcactgcaacctccacctcccgagttcaagcagttctcctgcctcagcctcctgaggagcttgtattacaggcaagcgccaccacgcctggccaatttttgtatttttagtagagatggggttttgccatgttgcccaggctggtcttgaactcctgacctaaagtgatccacccgacttggtctcccaaagtgctgggattacaggcgtgagccaccatgcctggcccatttacggttttttgacagaatgatcaaaagctttctcaacaagatattagagagaagagataacaaggtgggttagaaaaataaagtgaagccaggtgtggtggctgatgcctgtaatcccagcactttgggaggctgaggcaggcagatcacttgaggtcaggagtttgagaccagcctggccaacatggcgaaatcctgtctctactaaaaatacaaaaattagccaggcgtggtggcacgtgcctgtaatcccagcttcttgggaggctgagatgggagaatcacttgaaccctaggggcgggggttgcagtgaactcagatcacgccactacactccagcctgggcaacagagccagactccgtctcaaaaaaaaaaaaaaaagaaaagaaaagaaaaataaagtgaaggcaaaggtgagattagtttagtgataccaaacgtgggttaacttcagaaagcaccaggtcaagtgttgttttgttttgttgttcgatagcattccagaccctaaccccagaggattttttttagcaggtctagctagggaccagaaatccaaatttgttttggaaaagcttcccaggtatcagtggttgcctgggaaattaaggataaaaagaaagactgatgtttttctttttaccattttaaactgtttgaattattttttacatgactcatacaaatcaaaggtctggttagttactgtaatacaaaatgtgctgagttgtacagtacaaaatgtgttctctcaaatccttgctttatgtgggtcctcaaattaattaggtacagaaatttgttaagccaagatatacttctggaatgattgtctgagatatcagatttcagcctgattacatgatagagtaattaaaaactgaattaattatattttacattattagatttaatagaactttcagatttctggaaactaacactgtataaatatgtaaatatgtaatcccagtaacctttcttagagtaactgaatgtcatttgggtagtagacaaattctgtttatttcattgcccttttactttcagaaactaagttattaaagcacaaactgtatgcacaaatgaggggaaattgaaatgcaaacctcaatgaagagacatttttgtgctaaaattcctaattacataagttatttacaaaaacattcttgatttatggtgttccaaaatttcccttaaagcactgagttattaaaacttcccacagtatggccaggcatggtggctcatgcctataatcccagcactttgggaggccaaggcagaaggatcatttgagcttaggaggtcaaggctaccatgaactatgatcgtgccactgctctccagcctgggtaacagagcaaaaccttgtctctaaaaaataaaaataaggccgggtgcattggcttatgcttgtgatcccagcactttgggaggctgaggcgggtggatcacctgagatcaggagttcgagaccagtctgaccaatgtggtgaaaccccatctctactaaaattataaaaattagctgggcgtgatggtgtgcacctgtaatcccagctactcaggaggccgaggcaggagaatcgctggaacccaggaggcggaggttgcggtgagccaagattgcgccactgcactccagcctgggtgacagagcgagactccatctcaaaaaaataaataaataaataactttccacggtatgagtctatgttctatagaaatattgcatttgcacagaggtaaatgtaaagggatgtttgcagcaccattgtttataatagagaaaagttgtcagcaacctcagtatatgccaattatggtaaacacataattgaatactgtgcaaccattacatagattgtagatgatctgtatataccagcgtcaaaaggtgtttgtgataaacagagttaaaaaaaagcaagttatggaatagtgtgtaccatctgtgttggttagaaaagcagaaaagtataagctcatagaaaaatatatggccaacgtgttggcttatgcccgtaatcccagcacttttggaggccaaggcaagcagatcacctgagccctggtgttcgagaccagcctgggcaacgtggcgaaaccccatctccaccaaaaaatatacgtattaatatataaagctagccaggtgtggtggtgcatgcctgtagtcccagctactcgggaggctgagatgggagagttacttgagcccgtgaaacagaggttgcagtgacccaaggtggagccattgcactccagcctgggcgacagagcgagactgtgtctcaaaacaaaacaaaaaaatacttggtaggttaagaacaaagtgtttataggttttctgtgtgtgctgaaggaaagaataaggtgaaagacttttactgtaagtcttagtggtttggctgatttttttatctacctaatacttgcttttttttctttccatagcattatagccttcagaaaggccaacaaagtgggtattttcatcaaagttacaccacagcgtgaggagggtgaagtgaccgtgtgcttcaagatgaagcatgattttaaaaacctggcagcccccattcgccccattgaagaaagtgaccagggaacagaagtcatctggctcacccagcatgtggaacttagcttgggcccacttcttccttaaaaggttccactggagggcagatcccaaaggacagtatcaccgtaaacctgcgttaaaatgtggaagctgctgcttcattaggccttgtttataacgatgtacccatgcactacggaattctattgctaagaaagtgggagcataggcaaggcattgggaacacagggtagctgctgttgctcttgctctcacccctgttgacaccagtaagtctgtgtctccctcactgaaccctgcacgttgagtaacagcagcataattccatcctaggaaaggggatgggtgttccttggaatggcattgtatttaccacctgagaaactctgtactgtctcttgatctgatctcactaaggatcacaatgtcacagatgaaacttaaatgataacccaaaggtagacctgctgttaatgatccagcattggtcacaatgtaccaactgctttctgcattccgttaaatatcatctaacagtctaaaacatatcccttcattgccataatggctgccattttgccatagatttccatataactgaaaaactgaattgtcactttatctttagtatcatgatgattggaaaaacctgtgaagttgttaaggcactctcatttgccctctttttctaagtgaatacaggacacgtattagttgttcttaatttttttcccagtaaaatatggatcttttaagaagaatttgagaagcaaacaattacatgtcatgtcaagggggtagcagattccattcgttttcaatattgccacaatacccagggattaatgctgccacaggggggcaatctttatttgtcttacttcctaccccttccctgttctgcctctttaactcagttaagttgttctgtttgggacctggaaaagaacccaaagaaaacctgagtggacaggttcatttctggaatgcagaaaacattttaaaggctagatttttagaatattctcaactagcattctttccattgatttgaaggggaaattaactattataatctcttgaatccaaaactggatattaagaactttcccccttactaagtttaagacttttgtcatgtggtgagtcaaataagaccattttgattgtaaaccataaaatagttcagcaagtagcccacagttctggcctaacagcagacttgctgttttcacttggtatcctggagttgggttgctaaccttaatttctatgatgttttctaaaatgaaacttgataaagtagaccaccagctgcaccgtgttttctgtaaaagtattgttagtaagtggccaagagacttgaggaaaatacagattttttgtttaccttggtcttgttttaagtcttaaaaaattaaagataacattataatgtagaatacagatgggacatagtccttgtaagcttcccttgaaaatgttttaaatatttaggaagcttttaaaagacactaaattgtactctaaaagacactaaattgtactaattgtacaaaggtcaagccaattttatgaaacagtcctacagagtaatatatgtgatgcagtgtaagaaggaaaatactcatctctaacattatggtaataacatttagcctcttaggagttggagcagggggatgggtaattacagatttgcagactatagaaagagtttcatttttttgtgaccccacagagtctcaaatttttatttcactacctgctagagcctactgtgaaatcactgctccatatttgccagtggaggaaatgggcatagagtagagaatagcttcatatgtttacacgtttgcatagactacacacatgtcatgcgtttatggcaggtagctggtatttattccccaaagtaataatgttgaagtatgggtctcatcattcccatacacagaaacacaaaacactttgatcataaacttttttcttcagaagccaaactaacttgcagaataatagagccactggtttaatgtttcctcaagataggttttagtgtaagctagtattctgtgtgttcgtagaaatgattcaatacctgcagctggtgaattaggaattgtatttgttgccttttttatattagatgaggtgcaaaaattttaatgctagtcagtatgcaccaccacaggaaagttagatcccattagcacttgaaactacagctttggaaacttaggctaagttaatttggatttgttacttgattcacctactgaccttttcttttgtttgaagtgcttatcagcataatgagctaagtgtcatgcatatttgtgaagaaacaccctttttggtcccttttgggacagagaggtactccttgatctttatgaatgacaggttactgttttgccttattgcttaacttaatgtagtgaaataaagcagacaaagcttgagcgtgtcttttgtttgctctcatgtagatactaagtagcatggctcagagccaaaagacaagcgtgaagttaagagagttggctaagagagttggtggggcatgctcccttccattccttaaatgaagtaatctaaaatctcttagcaggttagttcaccataatatataagtagatgttgctttgagcttcttatatacatattcacagaaccattatataaatgttgttagacctcta

SEQ ID NO: 12917 - DNA, 9878 bp, Homo sapiens
aggagagccaggtcctcctgactcttacaaatccagttgagaacctcacccatgtgactctcttcgagtgtgaggagggggaccctgatgatatcaacagcactgctaaggtaggagcattttgcctcagcctgactgacccgcactttccctggagtgtcctcatttgacctggcttaaaagactccacacactctcctttccacatctagtcagcaagttcttttgattccacctcctaaatttttttactttatcctgaaacacactgccctatttgaaggtctcatcgtttcttacctggacagtgacaataacttcctaaatgaccttgctatttttataccaccacctctgtttcaacccatttcttctctcttgccaccagggtgatacttctaaaatctaactctgtgcatgctggtcatttagcattgctcttgactgagatgaagtccagatttttggcatagcataagagctgcttaatgacattacttctctgttcttccagtgtggtcttccttcagatcctcaaatttagcattccctgaatcgtacatattagtggttgtgatccagacagatccaatgggttataaactttgacactggagaattgtgtatgctattcattttacttagcatgcctccttcctatcctgactcccctaacatacatgccccttcagtctctcagtctcatacattcattcttcaacacttgtgaaatatcatttccttttagaaatgatacgtttaaaatcatttagaagctggtatgcctcctctagattcctctaccttacaaagagtatacataacatagcactaactagtctgggcttggtggctcacgcctgtaatcctagcactttgggaggccaaggtgagtggatcatctaaggtcaggagttcaagaccagcctggccaacatggtgaaacccgtctctactaaaatacaaaaattagccgggcatgatggcagatgcctgtaatctcagctactggggaggctgagatgggagaatcacttgaacccgggagacagtgattgcagtgagctgagatcgcgccactgcactccagcctgggcggctgaggtgagactccatctcaaaaaacaaaataactaaatgttaaagtaggtgattttgactcagtgtgagttgaatggatgtaatatggcctctctttatattttgctacttctagtacttgaaattttagaacaagagcctttctctatagatcatctattactaattcataattcagcatgatatttataatagaaatggtttaaaaagatgcctatatctttagttcttattcaaataatattagagaatttctgtcctctttttttttttcttctgctttttaatgatttcacttactagcatcacctccaaagagagataacacttatttcacttatttggtccttgttgcttttttttttttgagacggaatctcactcggtcgccaggctggagtgcagtggcgcagtctcggctcactgcactctccgcctcccagtttcaagcgattcccctacctcagcctcccaagtagctgggattacaggcgcctgccaccacgcccggctaattttttgcagttttagtagagacggggtttcaccctgttggccaggatggtctcaatcgcttgaccttgtgatccaccttcctcgggctcccaaagtgctgagattacagatctgagccactgtgccctgacgttcctttttttattaacactaataagcagctccagttaagacagacagaaataagtacctgatgcataagcacagcatatctttataaagctctctttatacctcccctcccacatttgtatctataattagaaatttgatcaacactgttaactgttaacctctgatagagcaaagttgaggcctaattacaacataagtctgaagaatgctaattgttttccatgaccataatcacccagtatctcatgtaagtttatgtatcaggtaccaggaatcagctggtaccatgtcaaaaaacattgtgttggaaccagtgtttctcctttgtgttgttcttaatgatggactgtttcagatgtatcaaaaaaaaatgaggaataatatggcaagtacccatttctccccatccccttaagaaattaaacattagggctaggcgcggtggctcacgcctgtaatcccaacagtttgggaggccgaggcaagtggatcatgagggcaggagttcgaaaccagcttggccaatatggtgaaaccccgtctctactaaaactgcaaaaaattagccaggcatggtggtgggcacctgtagtcctagctactcatgaggctgagtcaggagaatcgcttgaacccaggaggcagaggttgcagtgagccgagatcatgccatttgcactctagcctgggcgacagagtgagactccatctcaaaaaaataaataataaaataaaacattaaagacacaattgaagcccccatgttctccccagttcctcattgcagaccccatgaagtaagtactaacttagctttctcttaaaacctttgttcttataaactccatagaagtagtatatgtttcctgaaacttgctgtgtgcttccatttgtctaaatcaatgtcgtactttgctatattctgtcacactggtcccttctcaggcaggcctctctgtgttgctctccaggtggtggtgcctcccaaagagctcgttttagctggcaaggatgcagcagcagagtacgatgagttggcagaacctcaagactttcaggacgatcctgagtgagtgatctttttgtgatccccatacaacaaatggctgataatagaatgcccacttatatccagttttcttgtctggattttttaaaataacttttttcttcctgtttctaaaaataattattgtagaaaattggggaaatatatgtaagaccatgaagaagaaaataaaattatcccaccaccagagataaacaccattagcattttggcatttgtccttccaaatatttctcacctcattgggatcattctataaatacagttttttagcctttttcacttgaatatattttcccatgttaataaagaaatttttaattatatgattttaatggttgtggacaggatacaatactctgtccctagagattgatcatcgggtttgttccccacccccacccccttggaggaattaatagattttactctctcatatctaataactgaaaagaaccaaaccttccagtaactggggactgtgaccatcagagaattcagtctgtagactgaatgttttcaatgattcgaacagaggatttaatataaataattgttcacttgtgtaacttaaaaagtgaaaaagaacactgaagtagcaattttatgctacttcatgggcataaaatttcaaagatagctatttgatgagccagctaccaccccttaggtggagggaacaaagggaaatagttagaattattaaaatttagaacttaaacaaagagctccatgtagctgaaactcaggcctccagtgagctgaaggggaacactgcttgcgtggtcctggcatctcgtgatggcaaaggaggggtggcatgattatacaagaattggaaaacttcaactgcttactgccacttcctcctgggtaaagaagcattgctgggccgggcatggtggcttacccctgtattctcaacactttgggaggctgaggcaggaggattgcttcacaggagtttgaaaccagcctaggaatagagttaagactccgtctctacaaaaaaattttaaaaatagccaggtgtagcagcgcatgcttgtagtcccagctactcaggataccagggtgggagaatcagttgagcccggtaggctgaggctgcagtcagctgtgattgtgactgtactccagcctgggcaacagagtgataccctgtctcaaaaaaaaaaagacatttttggagtgatggccacagggaacagggaccacaagcaaacaggaatctctaaaggaagagcaagacccttcctcctccagacttctagtctccctttagagcccgctgctgacagaacctgacaaagagccatccgatccagcagatacagtccaagcagaatcctgtgtcacaaagcaaaattgagagaggtgcgcttggagctgaaaaataatagcttagtaaactggcacagggaacattcacagtctttgttttgtttttagagaaggagtctctgtcgcccaggctggagtgcaatggcgtgatctcctgctcactgcaacctccacctcccgagttcaagcagttctcctgcctcagcctcctgaggagcttgtattacaggcaagcgccaccacgcctggccaatttttgtatttttagtagagatggggttttgccatgttgcccaggctggtcttgaactcctgacctaaagtgatccacccgacttggtctcccaaagtgctgggattacaggcgtgagccaccatgcctggcccatttacggttttttgacagaatgatcaaaagctttctcaacaagatattagagagaagagataacaaggtgggttagaaaaataaagtgaagccaggtgtggtggctgatgcctgtaatcccagcactttgggaggctgaggcaggcagatcacttgaggtcaggagtttgagaccagcctggccaacatggcgaaatcctgtctctactaaaaatacaaaaattagccaggcgtggtggcacgtgcctgtaatcccagcttcttgggaggctgagatgggagaatcacttgaaccctaggggcgggggttgcagtgaactcagatcacgccactacactccagcctgggcaacagagccagactccgtctcaaaaaaaaaaaaaaaagaaaagaaaagaaaaataaagtgaaggcaaaggtgagattagtttagtgataccaaacgtgggttaacttcagaaagcaccaggtcaagtgttgttttgttttgttgttcgatagcattccagaccctaaccccagaggattttttttagcaggtctagctagggaccagaaatccaaatttgttttggaaaagcttcccaggtatcagtggttgcctgggaaattaaggataaaaagaaagactgatgtttttctttttaccattttaaactgtttgaattattttttacatgactcatacaaatcaaaggtctggttagttactgtaatacaaaatgtgctgagttgtacagtacaaaatgtgttctctcaaatccttgctttatgtgggtcctcaaattaattaggtacagaaatttgttaagccaagatatacttctggaatgattgtctgagatatcagatttcagcctgattacatgatagagtaattaaaaactgaattaattatattttacattattagatttaatagaactttcagatttctggaaactaacactgtataaatatgtaaatatgtaatcccagtaacctttcttagagtaactgaatgtcatttgggtagtagacaaattctgtttatttcattgcccttttactttcagaaactaagttattaaagcacaaactgtatgcacaaatgaggggaaattgaaatgcaaacctcaatgaagagacatttttgtgctaaaattcctaattacataagttatttacaaaaacattcttgatttatggtgttccaaaatttcccttaaagcactgagttattaaaacttcccacagtatggccaggcatggtggctcatgcctataatcccagcactttgggaggccaaggcagaaggatcatttgagcttaggaggtcaaggctaccatgaactatgatcgtgccactgctctccagcctgggtaacagagcaaaaccttgtctctaaaaaataaaaataaggccgggtgcattggcttatgcttgtgatcccagcactttgggaggctgaggcgggtggatcacctgagatcaggagttcgagaccagtctgaccaatgtggtgaaaccccatctctactaaaattataaaaattagctgggcgtgatggtgtgcacctgtaatcccagctactcaggaggccgaggcaggagaatcgctggaacccaggaggcggaggttgcggtgagccaagattgcgccactgcactccagcctgggtgacagagcgagactccatctcaaaaaaataaataaataaataactttccacggtatgagtctatgttctatagaaatattgcatttgcacagaggtaaatgtaaagggatgtttgcagcaccattgtttataatagagaaaagttgtcagcaacctcagtatatgccaattatggtaaacacataattgaatactgtgcaaccattacatagattgtagatgatctgtatatacagcgtcaaaaggtgtttgtgataaacagagttaaaaaaaagcaagttatggaatagtgtgtacatctgtgttggttagaaaagcagaaaagtataagctcatagaaaaatatatggccaacgtgttggcttatgcccgtaatcccagcacttttggaggccaaggcaagcagatcacctgagccctggtgttcgagaccagcctgggcaacgtggcgaaaccctatctccaccaaaaaatatacgtattaatatataaagctagccaggtgtggtggtgcatgcctgtagtcccagctactcgggaggctgagatgggagagttacttgagcccgtgaaacagaggttgcagtgacccaaggtggagccattgcactcccagcctgggcgacagagcgagactgtgtctcaaaacaaaacaaaaaaatacttggtaggttaagaacaaagtgtttataggttttctgtgtgtgcctgaaggaaagaataaggtgaaagacttttactgtaagtcttagtggtttggctgatttttttatctacctaatacttgcttttttttctttccatagcattatagccttcagaaaggccaacaaagtgggtattttcatcaaagttacaccacagcgtgaggagggtgaagtgaccgtgtgcttcaagatgaagcatgattttaaaaacctggcagcccccattcgccccattgaagaaagtgaccagggaacagaagtcatctggctcacccagcatgtggaacttagcttgggcccacttcttccttaaaaggttccactggagggcagatcccaaaggacagtatcaccgtaaacctgcgttaaaatgtggaagctgctgcttcattaggccttgtttataacgatgtacccatgcactacggaattctattgctaagaaagtgggagcataggcaggcattgggaacacagggtagctgctgttgctcttgctctcacccctgttgacaccagtaagtctgtgtctccctcactgaaccctgcacgttgagtaacagcagcataattccatcctaggaaaggggatgggtgttccttggaatggcattgtatttaccacctgagaaactctgtactgtctcttgatctgatctcactaaggatcacaatgtcacagatgaaacttaaatgataacccaaaggtagacctgctgttaatgatccagcattggtcacaatgtaccaactgctttctgcattccgttaaatatcatctaacagtctaaaacatatcccttcattgccataatggctgccattttgccatagatttccatataactgaaaaactgaattgtcactttatctttagtatcatgatgattggaaaaacctgtgaagttgttaaggcactctcatttgccctctttttctaagtgaatacaggacacgtattagttgttcttaatttttttcccagtaaaatatggatcttttaagaagaatttgagaagcaaacaattacatgtcatgtcaagggggtagcagattccattcgttttcaatattgccacaatacccagggattaatgctgccacaggggggcaatctttatttgtcttacttcctaccccttccctgttctgcctctttaactcagttaagttgttctgtttgggacctggaaaagaacccaaagaaaacctgagtggacaggttcatttctggaatgcagaaaacattttaaaggctagatttttagaatattctcaactagcattctttccattgatttgaaggggaaattaactattataatctcttgaatccaaaactggatattaagaactttcccccttactaagtttaagacttttgtcatgtggtgagtcaaataagaccattttgattgtaaaccataaaatagttcagcaagtagcccacagttctggcctaacagcagacttgctgttttcacttggtatcctggagttgggttgctaaccttaatttctatgatgttttctaaaatgaaacttgataaagtagaccaccagctgcaccgtgttttctgtaaaagtattgttagtaagtggccaagagacttgaggaaaatacagattttttgtttaccttggtcttgttttaagtcttaaaaaattaaagataacattataatgtagaatacagatgggacatagtccttgtaagcttcccttgaaaatgttttaaatatttaggaagcttttaaaagacactaaattgtactctaaaagacactaaattgtactaattgtacaaaggtcaagccaattttatgaaacagtcctacagagtaatatatgtgatgcagtgtaagaaggaaaatactcatctctaacattatggtaataacatttagcctcttaggagttggagcagggggatgggtaattacagatttgcagactatagaaagagtttcatttttttgtgaccccacagagtctcaaatttttatttcactacctgctagagcctactgtgaaatcactgctccatatttgccagtggaggaaatgggcatagagtagagaatagcttcatatgtttacacgtttgcatagactacacacatgtcatgcgtttatggcaggtagctggtatttattccccaaagtaataatgttgaagtatgggtctcatcattcccatacacagaaacacaaaacactttgatcataaacttttttcttcagaagccaaactaacttgcagaataatagagccactggtttaatgtttcctcaagataggttttagtgtaagctagtattctgtgtgttcgtagaaatgattcaatacctgcagctggtgaattaggaattgtatttgttgccttttttatattagatgaggtgcaaaaattttaatgctagtcagtatgcaccaccacaggaaagttagatcccattagcacttgaaactacagctttggaaacttaggctaagttaatttggatttgttacttgattcacctactgaccttttcttttgtttgaagtgcttatcagcataatgagctaagtgtcatgcatatttgtgaagaaacaccctttttggtcccttttgggacagagaggtactccttgatctttatgaatgacaggttactgttttgccttattgcttaacttaatgtagtgaaataaagcagacaaagcttgagcgtgtcttttgtttgctctcatgtagatactaagtagcatggctcagagccaaaagacaagcgtgaagttaagagagttggctaagagagttggtggggcatgctcccttccattccttaaatgaagtaatctaaaatctcttagcaggttagttcaccataatatataagtagatgttgctttgagcttcttatatacatattcacagaaccattatataaatgttgttagacctcta

SEQ ID NO: 12918 - DNA, 676 bp, Homo sapiens
actgttccttccctcctcttacttagatgaattattcatactcttcctgttggaacccagccccacctcttaacactgaagctcatcctcttacctattcacagatagcatcggcagctccctccttcccttttccattagcatgtgatttctctcatcttaaaaaagaaattggcctcactctcctcttcagctgccactccatttctccactccctgtacagcaaaactcctctaactctgactgggcatgatcgctcacacctgtaatcccagcgctttaggaggccgaggtgagaggatgatttgaggccaggagtttgagacaagactggaaaacctaacaagaccttgtctctgtttaagtaaaagttttttaaaaaacaaaaatggccaggtgcggtggctcacacctgtaatcccagcactttgggaggctgaggcgggcagatcacgaggtcaggagatcgagaccatcctggctaacaaggtgaaatcccgtctctactaaaaataataaaaaaaattagccgggcctggtggcaggtgcctgtagtcccagctactctcgaggctgaggcaggagaatggcgtgaacctgggaggcggagcttgcagtgagccaagatcacgccacggcactccagcctgggcagcagagcgagactccgtctca

SEQ ID NO: 12919 - DNA, 514 bp, Homo sapiens
actgttccttccctcctcttacttagatgaattattcatactcttcctgttggaacccagccccacctcttaacactcaagctcatcctcttacctattcacagatagcatcggcagctccctccttcccttttccattagcatgtgatttctctcatcttaaaaaagaaattggcctcactctcctcttcagctgccactccatttctccactccctgtacagcaaaactcctctaactctgactgggcatgatcgctcacacctgtaatcccagcgctttaggaggccgaggtgagaggatcatttgaggccaggagtttgagacaagactggaaaacctaacaagaccttgtctctgtttaagtaaaagttttttaaaaaacaaaaatggccaggtgcggtggctcacacctgtaatcccagcactttgggaggctgaggcgggcagatcacgaggtcaggagatcgagaccatcctggctaacaaggtgaaatcccgtctctactaaaaa

SEQ ID NO: 12920 - DNA, 676 bp, Homo sapiens; identical to SEQ ID NO: 12918

SEQ ID NO: 12921 - DNA, 947 bp, Homo sapiens
agtttatatcagtttcacttcaattttttagggttgcataatttgccacaattttcatcagatattttggaatgatgtagcagaatacatcaagaaaatctccagttcttttgacaatttttgttagagctttttgattcttaccctcatggaaatacttgtgtataaatatagaaaatctcagattaaattattttcttggtagccttgcctgttcctattaagccacagaaaatattaataaggtgaatatgttaactttatttttcaaattattgttaatctcagcatactatgaagaacatgaatgtactgtacacacaaacaacttgatgtctcactaaatgaaagacacatgtgcattagatccatctacctttcaggcacagtcatggggtttttaactccacaacattaactggaattgtggaatacagataagatcataattgcaaagatgtgatattccctgaagaattttttatctatgatcaaaatgcaaaaaatttaatgtgttatggtaatgttccttattatccatgattaagtcacaccaaaatggcacaaagaccaggaaaccagccaagcattcactggaggcattactcagtgtctgagagattcagttgatttatatgaattaaggaatattttactatctagtatgtatcatttaaaataaaacaaaccttctaaagatgataattgtaaacatttgaattgtgtttttaattggaaaagtaatgagcttgtactgttaagctgtttcttattttatgttctatgctttcacaatttacatttacttacttgtaaattgtgttatctgaagaattttttccatatctgatgtctgcataactccggaatattgttagacatttaataggaacctaattataaaacaaatttatttactatgtatgccattaaaaacattacaatta

SEQ ID NO: 12922 - DNA, 947 bp, Homo sapiens; identical to SEQ ID NO: 12921

SEQ ID NO: 12923 - DNA, 949 bp, Homo sapiens
agtttatatcagtttcacttcaattttttagggttgcataatttgccacaattttcatcagatattttggaatgatgtagcagaatacatcaagaaaatctccagttcttttgacaatttttgttagagctttttgattcttaccctcatggaaatacttgtgtataaatatagaaaatctcagtattaaattattttcttggtagccttgcctgttcctattaagccacagaaaatattaataaggtgaatatgttaactttatttttcaaattattgtaatctcagcatactatgaagaacatgaatgtagcggaacacactatacaacttgatgtctcactaaaggaaagacacatgtgcattagatccatctacctttcaggcacagtcatggggtttttaactccacaacattaactggaattgtggaatacagataagatcataattgcaaagatgtgatattccctgaagaattttttatctatgatcaaaatgcaaaaaatttaatgtgttatggtaatgttccttattatccatgattaagtcacaccaaaatggcacaaagaccaggaaaccagccaagcattcactggaggcattactcagtgtctgagagattcagttgatttatatgaattaaggaatattttactatctagtatgtatcatttaaaataaaacaaaccttctaaagatgataattgtaaacatttgaattgtgtttttaattggaaaagtaatgagcttgtactgttaagctgtttcttattttatgttctatgctttcacaatttacatttacttacttgtaaattgtgttatctgaagaattttttccatatctgatgtctgcataactccggaatattgttagacatttaataggaacctaattataaaacaaatttatttactatgtatgccattaaaaacattacaatta

SEQ ID NO: 12924 - DNA, 4152 bp, Homo sapiens
aaataaaaaccactcctaggaagaaactgcatcaactaacgagcaaaatcaccagctaacatcataatgacaggttcaaattcacacataacaatattaactttaaatataaatggacaaaattctgcaattaaaagacacagactggcaagttggataaagagtcaagacccatcagtgtgctgtattcaggaaacccatctcacgtgcagagacacacataggctcaaaataaaaggatggagaaagatctaccaagccaatggaaaacaaaaaaaggcaggggttgcaatcctagtctctgataaaacagattttaaaccaacaaagatcaaaagagacaaagaaggccattacataatggtaaagggatcaattcaacaagaggagctaactatcctaaatatttatgcacccaatacaggagcacccagattcataaagcaagtcctgagtgacctacaaagagacttagactcccacacattaataatgggagactttaacaccccactgtcaacattagacagaacaacgagacagaaagtcaacaaggatacccaggaattgaactcagctctgcaccaagcggacctaatagacatctacagaactctccaccccaaatcaacagaatatacatttttttcagcaccacaccacacctattccaaaattgaccacatagttggaagtaaagctctcctcagcaaatgtaaaagaacagaaattataacaaactatctctcagaccacagtgcaatcaaactagaactcaggattaataatctcactcaaagccgctcaactacatggaaactgaacaacctgctcctgaatgactactgggtacataacgaaatgaaggcagaaataaagatgttctttgaaaccaacgagaacaaagacaccacataccagaatctctgggacgcattcaaagcagtgtgtagagggaaatttatagcactaaatgcctacaagagaaagcaggaaagatccaaaattgacaccctaacatcacaattaaaagaactagaaaagcaagagcaaacacattcaaaatctagcagaaggcaagaaataactaaaatcagagcagaactgaaggaaatagagacacaaaaaaaccttcaaaaaatcaatgaatccaggagctggttttttgaaaggatcaacaaaattgatagaccgctagcaagactaataaagaaaaaaagagagaagaatcaaatagacacaataaaaaatgataaaggggatatcaccaccgatcccacagaaatacaaactaccatcagagaatactacaaacacctctacgcaaataaactagaaaatctagaagaaatggatacattcctcgacacatacactctcccaagactaaaccaggaagaagttgaatctctgaatagaccaataacaggctctgaaattgtggcaataatcaatagtttaccaaccaaaaagagtccaggaccagatggattcacagccgaattctaccagaggtacaaggaggaactggtaccattccttctgaaactattccaatcaatagaaaaagagggaatcctccctaactcattttatgaggccagcatcattctgataccaaagccgggcagagacacaaccaaaaaagagaattttagaccaatatccttgatgaacattgatgcaaaaatcctcaataaaatactggcaaaccgaatccagcagcacatcaaaaagcttatccaccatgatcaagtgggcttcatccctgggatgcaaggctggttcagtatacgcaaatcaataaatgtaatccagcatataaacagagccaaagacaaaaaccacatgattatctcaatagttgcagaaaaagcctttgacaaaattcaacaacgcttcatgctaaaaactctcaatgaattaggtgttgatgggacgtatttcaaaataataagagctatctatgacaaacccacagccaatatcatactggatgggcaaaaactggaagcattccctttgaaaactggcacaagacagggatgccctctctcaccactcctattcaacatagtgttggaagttctggccagggcaataaggcaggagaaggaaataaagggtattcaattaggaaaagaggaagtcaaattgtccctgtttgcagacgacatgattgtttatctagaaaaccccatcgtctcagcccaaaatctccttaagctgataagcaacttcagcaaagtctcaggatacaaaatcaatgtacaaaaatcacaagcattcttatacaccaacaacagacaaacagagagccaaatcatgagtaaactcccattcacaattgcttcaaagagaataaaatacctaggaatccaacttacaagggatgtgaaggacctcttcaaggagaactacaaaccactgctcaaggaaataaaagaggacacaaacaaatggaagaacattccatgctcatgggtaggaagaatcaatatcgtgaaaatggccatactgcccaaggtaatttacagattcaatgccatccccatcaagctaccaatgactttcttcacagaattggaaaaaactactttaaagttcatatggaaccaaaaaagagcccgcatcgccaagtcaatcctaagccaaaagaacaaagctggaggcatcacactacctgacttcaaactatactacaaggctacagtaaccaaaacagcatggtactggtaccaaaacagagatatagatcaatggaacagaacagaaccctcagaaataatgccgcatatctacaactatctgatctttgacaaacctgagaaaaacaggcaatggggaaaggattccctatttaataaatggtgctgggaaaactggctagccatatgtagaaagctgaaactggatcccttccttacaccttatacaaaaatcaattcaagatggattaaagatttaaacgttagacctaaaaccataaaaaccctagaagaaaacctaggcattaccattcaggacataggcgtgggcaaggacttcatgtccaaaacaccaaaagcaatggcaacaaaagccaaaattgacaaatgggatctaattaaactaaagagcttctgcacagcaaaagaaactaccatcagagtgaacaggcaacctacaacatgggagaaaattttcgcaacctactcatctgacaaagggctaatatccagaatctacaatgaactcaaacaaatttacaagaaaaaaacaaacaaccccatcaaaaagtgggcgaaggacatgaacagacacttctcaaaagaagacatttatgcagccaaaaaacacatgaaaaaatgctcatcatcactggccatcagagaaatgcaaatcaaaaccactatgagatatcatctcacaccagttagaatggcaatcattaaaaagtcaggaaacaacaggtgctggagaggttgtggagaaataggaacacttttacactgttggtgggactgtaaactagttcaaccattgtggaagtcattgtggcgattcctcagggatctagaactagaaataccatttgacccagccatcccattactgggtatatacccaaatgactataaatcatgctgctataaagacacatgcacacgtatgtttattgcggcattattcacaatagcaaagacttggaaccaacccaaatgtccaacaatgatagtctggattaagaaaatgtggcacatatacaccatggaatactatgcagccataaataatgatgagttcatgtcctttgtagggacatggatgaaattggaaaccatcattctcagtaaactatcgcaagaacaaaaaaccaaacaccgcatattctcactcataggtgggaattgaacaatgagatcacatggacacaggaaggggaatatcacactctggggactgttgtggggtcgggggaggggggagggatagcattgggagatatacctaatgatagatgacacgttagtgggtgcagcgcaccagcatgggcacatgtatacatatgtaactaacctgcacaatgtgcacatgtaccctaaaacttaaagtataataaaaaataaaaaataaaaaaataataaaaaaataaaaaaaaaaagaaataaa

SEQ ID NO: 12925 - DNA, 4152 bp, Homo sapiens
aaataaaaaccactcctaggaagaaactgcatcaactaacgagcaaaatcaccagctaacatcataatgacaggttcaaattcacacataacaatattaactttaaatataaatggacaaaattctgcaattaaaagacacagactggcaagttggataaagagtcaagacccatcagtgtgctgtattcaggaaacccatctcacgtgcagagacacacataggctcaaaataaaaggatggagaaagatctaccaagccaatggaaaacaaaaaaaggcaggggttgcaatcctagtctctgataaaacagattttaaaccaacaaagatcaaaagagacaaagaaggccattacataatggtaaagggatcaattcaacaagaggagctaactatcctaaatatttatgcacccaatacaggagcacccagattcataaagcaagtcctgagtgacctacaaagagacttagactcccacacattaataatgggagactttaacaccccactgtcaacattagacagaacaacgagacagaaagtcaacaaggatacccaggaattgaactcagctctgcaccaagcggacctaatagacatctacagaactctccaccccaaatcaacagaatatacatttttttcagcaccacaccacacctattccaaaattgaccacatagttggaagtaaagctctcctcagcaaatgtaaaagaacagaaattataacaaactatctctcagaccacagtgcaatcaaactagaactcaggattaataatctcactcaaagccgctcaactacatggaaactgaacaacctgctcctgaatgactactgggtacataacgaaatgaaggcagaaataaagatgttctttgaaaccaacgagaacaaagacaccacataccagaatctctgggacgcattcaaagcagtgtgtagagggaaatttatagcactaaatgcctacaagagaaagcaggaaagatccaaaattgacaccctaacatcacaattaaaagaactagaaaagcaagagcaaacacattcaaaatctagcagaaggcaagaaataactaaaatcagagcagaactgaaggaaatagagacacaaaaaacccttcaaaaaatcaatgaatccaggagctggttttttgaaaggatcaacaaaattgatagaccgctagcaagactaataaagaaaaaaagagagaagaatcaaatagacacaataaaaaatgataaaggggatatcaccaccgatcccacagaaatacaaactaccatcagagaatactacaaacacctctacgcaaataaactagaaaatctagaagaaatggatacattcctcgacacatacactctcccaagactaaaccaggaagaagttgaatctctgaatagaccaataacaggctctgaaattgtggcaataatcaatagtttaccaaccaaaaagagtccaggaccagatggattcacagccgaattctaccagaggtacaaggaggaactggtaccattccttctgaaactattccaatcaatagaaaaagagggaatcctccctaactcattttatgaggccagcatcattctgataccaaagccgggcagagacacaaccaaaaaagagaattttagaccaatatccttgatgaacattgatgcaaaaatcctcaataaaatactggcaaaccgaatccagcagcacatcaaaaagcttatccaccatgatcaagtgggcttcatccctgggatgcaaggctggttcagtatacgcaaatcaataaatgtaatccagcatataaacagagccaaagacaaaaaccacatgattatctcaatagttgcagaaaaagcctttgacaaaattcaacaacgcttcatgctaaaaactctcaatgaattaggtgttgatgggacgtatttcaaaataataagagctatctatgacaaacccacagccaatatcatactggatgggcaaaaactggaagcattccctttgaaaactggcacaagacagggatgccctctctcaccactcctattcaacatagtgttggaagttctggccagggcaataaggcaggagaaggaaataaagggtattcaattaggaaaagaggaagtcaaattgtccctgtttgcagacgacatgattgtttatctagaaaaccccatcgtctcagcccaaaatctccttaagctgataagcaacttcagcaaagtctcaggatacaaaatcaatgtacaaaaatcacaagcattcttatacaccaacaacagacaaacagagagccaaatcatgagtaaactcccattcacaattgcttcaaagagaataaaatacctaggaatccaacttacaagggatgtgaaggacctcttcaaggagaactacaaaccactgctcaaggaaataaaagaggacacaaacaaatggaagaacattccatgctcatgggtaggaagaatcaatatcgtgaaaatggccatactgcccaaggtaatttacagattcaatgccatccccatcaagctaccaatgactttcttcacagaattggaaaaaactactttaaagttcatatggaaccaaaaaagagcccgcatcgccaagtcaatcctaagccaaaagaacaaagctggaggcatcacactacctgacttcaaactatactacaaggctacagtaaccaaaacagcatggtactggtaccaaaacagagatatagatcaatggaacagaacagaaccctcagaaataatgccgcatatctacaactatctgatctttgacaaacctgagaaaaacaggcaatggggaaaggattccctatttaataaatggtgctgggaaaactggctagccatatgtagaaagctgaaactggatcccttccttacaccttatacaaaaatcaattcaagatggattaaagatttaaacgttagacctaaaaccataaaaaccctagaagaaaacctaggcattaccattcaggacataggcgtgggcaaggacttcatgtccaaaacaccaaaagcaatggcaacaaaagccaaaattgacaaatgggatctaattaaactaaagagcttctgcacagcaaaagaaactaccatcagagtgaacaggcaacctacaacatgggagaaaattttcgcaacctactcatctgacaaagggctaatatccagaatctacaatgaactcaaacaaatttacaagaaaaaaacaaacaaccccatcaaaaagtgggcgaaggacatgaacagacacttctcaaaagaagacatttatgcagccaaaaaacacatgaaaaaatgctcatcatcactggccatcagagaaatgcaaatcaaaaccactatgagatatcatctcacaccagttagaatggcaatcattaaaaagtcaggaaacaacaggtgctggagaggttgtggagaaataggaacacttttacactgttggtgggactgtaaactagttcaaccattgtggaagtcattgtggcgattcctcagggatctagaactagaaataccatttgacccagccatcccattactgggtatatacccaaatgactataaatcatgctgctataaagacacatgcacacgtatgtttattgcggcattattcacaatagcaaagacttggaaccaacccaaatgtccaacaatgatagtctggattaagaaaatgtggcacatatacaccatggaatactatgcagccataaataatgatgagttcatgtcctttgtagggacatggatgaaattggaaaccatcattctcagtaaactatcgcaagaacaaaaaaccaaacaccgcatattctcactcataggtgggaattgaacaatgagatcacatggacacaggaaggggaatatcacactctggggactgttgtggggtcgggggaggggggagggatagcattgggagatatacctaatgatagatgacacgttagtgggtgcagcgcaccagcatggcacatgtatacatatgtaactaacctgcacaatgtgcacatgtaccctaaaacttaaagtataataaaaaataaaaaataaaaaaataataaaaaaataaaaaaaaaaagaaataaaa

SEQ ID NO: 12926 - DNA, 2788 bp, Homo sapiens
tacattcctcgacacatacactctcccaagactaaaccaggaagaagttgaatctctgaatagaccaataacaggctctgaaattgtggcaataatcaatagtttaccaaccaaaaagagtccaggaccagatggattcacagccgaattctaccagaggtacaaggaggaactggtaccattccttctgaaactattccaatcaatagaaaaagagggaatcctccctaactcattttatgaggccagcatcattctgataccaaagccgggcagagacacaaccaaaaaagagaattttagaccaatatccttgatgaacattgatgcaaaaatcctcaataaaatactggcaaaccgaatccagcagcacatcaaaaagcttatccaccatgatcaagtgggcttcatccctgggatgcaaggctggttcagtatacgcaaatcaataaatgtaatccagcatataaacagagccaaagacaaaaaccacatgattatctcaatagttgcagaaaaagcctttgacaaaattcaacaacgcttcatgctaaaaactctcaatgaattaggtgttgatgggacgtatttcaaaataataagagctatctatgacaaacccacagccaatatcatactggatgggcaaaaactggaagcattccctttgaaaactggcacaagacagggatgccctctctcaccactcctattcaacatagtgttggaagttctggccagggcaataaggcaggagaaggaaataaagggtattcaattaggaaaagaggaagtcaaattgtccctgtttgcagacgacatgattgttatctagaaaaaccccatcgtctcagcccaaaatctccttaagctgataagcaacttcagcaaagtctcaggatacaaaatcaatgtacaaaaatcacaagcattcttatacaccaacaacagacaaacagagagccaaatcatgagtaaactcccattcacaattgcttcaaagagaataaatacctaggaatccaacttacaagggatgtgaaggacctcttcaaggagaactacaaaccactgctcaaggaaataaaagaggacacaaacaaatggaagaacattccatgctcatgggtaggaaaaatcaatatcgtgaaaatggccatactgcccaaggtaatttacagattcaatgccatccccatcaagctaccaatgactttcttcacagaattggaaaaaactactttaaagttcatatggaaccaaaaaagagcccgcatcgccaagtcaatcctaagccaaaagaacaaagctggaggcatcacactacctgacttcaaactatactgcaaggctacagaaaccaaaacagcatggtactggtaccaaaacagggatatagatcaatggaacagaacagaaccctcagaaataatgccgcatatctacaactatctgatctttgacaaacctgagaaaaacaggcaatggggaaaggattccctatttaataaatggtgctgggaaaactggctagccatatgtagaaagctgaaactggatcccttccttacaccttatacaaaaatcaattcaagatggattaaagatttaaacgttagacctaaaaccataaaaaccctagaagaaaacctaggcattaccattcaggacataggcgtgggcaaggacttcatgtccaaaacaccaaaagcaatggcaacaaaagccaaaattgacaaatgggatctaattaaactaaagagcttctgcacagcaaaagaaactaccatcagagtgaacaggcaacctacaacatgggagaaaattttcgcaacctactcatctgacaaagggctaatatccagaatctacaatgaactcaaacaaatttacaagaaaaaaacaaacaaccccatcaaaaagtgggcgaaggacatgaacagacacttctcaaaagaagacatttatgcagccaaaaaacacatgaaaaaatgctcatcatcactggccatcagagaaatgcaaatcaaaaccactatgagatatcatctcacaccagttagaatggcaatcattaaaaagtcaggaaacaacaggtgctggagaggttgtggagaaataggaacacttttacactgttggtgggactgtaaactagttcaaccattgtggaagtcattgtggcgattcctcagggatctagaactagaaataccatttgacccagccatcccattactgggtatatacccaaatgactataaatcatgctgctataaagacacatgcacacgtatgtttattgcggcattattcacaatagcaaagacttggaaccaacccaaatgtccaacaatgatagtctggattaagaaaatgtggcacatatacaccatggaatactatgcagccataaataatgatgagttcatgtcctttgtagggacatggatgaaattggaaaccatcattctcagtaaactatcgcaagaacaaaaaaccaaacaccgcatattctcactcataggtgggaattgaacaatgagatcacatggacacaggaaggggaatatcacactctggggactgttgtggggtcggggaggggggagggatagcattgggagatatacctaatgatagatgacacgttagtgggtgcagcgcaccagcatgtgcacatgtatacatatgttacttacctgcacaatgtgcacatggtaccctaaaacttaaagtataataaaaaataaaaaataaaaaaataataaaaaaataaaaaaaaaaa

SEQ ID NO: 12927 - DNA, 6074 bp, Homo sapiens
gattctccagaacttagggcctagagatagcaaacccgaattccaaaatgtctctgctacttatcaaccgtatgtggccttgggtaagtactgaacctcttttggcttcagcttcatcatttatgtgggaattcagctccacatagattctctgatctcctgtgattcaccatgctccaggtaagggactgggccacagagatgagcaggagaaggccttgccttcgggtctgccttttaaaggcaagtgagcaggtccttactcctaatggtcgctgtgatgactgctgcacaagaccactggcctcgccctcactgaccccatgggggagtcaggagaatcagatgcagaagcttgcagaatgccagagcttcacatatggaggctattactgtcgtcattataaccataaccctctgcaggtcagcccggtaataagaggacagaaaaaatactgggggctggtctaatttctgagttgacaaatgctaatgcaacttgatagttactatttaattcccaagagtttgagagattttaagtatattttacttaaatgttggattactgcaacccccaaattatttcaggtgcatgtattaaattaggcttttcatctcgcactgtaggtggctgagtttgtacagtctcttctgggctgtgaagagcatgccaagtgctttaagaaagaggtaagagatgcaaaaattatatatatatatatgtatatatatatatatgtgtgtgtatatatatatatgtatatatatatatgtatgtatttctatacttctagacccagaagtgttttgttttcatttacttaagtgtaaataagtacaatttgggggcagcaagacaaaggagatccagcaggaatagagcccaattatgcagtgtgagaccaagctgggtcagtctccgccttcagtcctcttacattttgctaggttttgttgcagaatgccatggtgcttggtgcatacagcatgctcagtacgtatactatttgctggaagagtaaatgaaaaagataattaattaatacctatcagtgtcatgaggcctctccattggtggcttgaagccatttgcgggaaggcaggaatcctcccttgggattgcacctgggaaagattggggatttgtctactccaaagtcagcatgggaccctcctatctatccctgccctgcatttgcttccagagcagccccaaatccttctacggggtttctatctcctgtcccctcttggttgggaatgtactgaactgcttcgcatatttcctggaattagtatccatagctataggggccccggaagagactggaccagctacagaatgatgcacatactaatcccagtgcttgtgtatcaggggcttgccatgtgccaggcatggtgctaagcattttacaaccattatcctttgatccttgtgacaacactacaatggcagcttaccgatgaagaagctcaggcccaggaaggtgaggcagagcaagaaaagggcaagaaaagtcggattccagctcatatccatctgagagctcagagcctccatcgctgctctagaactttccaagaaaaccatcctcatagaaactgaaaggcagcacatacctctccctctctcaggttcagagcatgcatgagttaaggaagtgctgagttttgggttctggacccctccgagcacagtagaggaactcagcatcaaggtcagatagcctcagtctgggtagctgctacctgtggggttcgcctggctctgcctgagctcagcatggcttgggcatagttggccacgttcacacatacagtctactctgcaggtagcgatgatcaaggcttgctttgtcctcaagtctgtccacgtagggtaagagggagtggctttttgcaggttgaattgcttatatttggcactcactgaccagtactgtcactttaggcagattgctgaacccctcttatccctcctctctgaaacacagatttacgagaggggcccttaaagattagggtgagcatgtttgaagcaccgagccctgttcttgtcccaaagtaggggcttaataaaggcagcagtatatagcagagggtctcctctgggctccaacaagctctgccagaaatcccaactttgccccttagaagctgcatgagcttgggcaagtcattaagcttgcaattccaggtttcctcacctatattacagggttatcaggaggatcaaacccatataatagattactgtagctccataaatgttagctgttgttgtcaccatcacgaccttattcttaggacaatggggtatttggacagcaatttttgcctgaaaatgctggagcttagccaggtcagggtatggatgtaggctcattctcctctgccttggggaaaatgccttttccgagggaaaaagtgtttcctcctctagatggatgagtccttatcagacaatatatcataaatgcacaggaaggttttaaaaacttttttaaatattataacttcaaaacgctacccttggggtcccagggtaattctatcagtgagacattgacactacaggatttttcttcctcttcttcttcgtcgtcttcttcttcttcttgttcttcttcttcttcttcttcttcttctttttcttcttcttcttcttcttcttcttcttcttcttcttcttcttcttcttcttcttcttcttcttctccttctccttctccttctcctcctcctcctcctctttctccttctcctcctcctccttctccttccttctttttccttcttcttcccttctttttttttttttgaggtggagtctctatctgttgcccaggctggaatgcattgggatgatcttgtctcactgcaacctctgcctcccaagttcaagcaattctcctgcctgagtagctgggactacaggcgcatgccactacgcctggctaatttttgtattttcagtagagatggagcaggggcggggggtctcaccatgttggccaggctggtctcaaactcgtgacctcaattgatctgcccacctcggcctcccaaagtgctgggattacagacatgagccaccatgactggctggggtttgtattattaaatttgaaaaggtttagaaccacagttctaagttcgtggaagaatgtttccatagaaaacccttccattcctgccttcttggttctggagccaggaatcatctgagccaggctgtgtcaatcagagacgctgcagtagtccctggagttgtgctgaggtcactggggcatccagaagctggggaaagcagcctacacggtggccactgccatcctgtgagtctcggggaagctattactttcatgctgtaatatctttttaatttaaaaatatttaattgtcaaaacaagattgaatacattcaaagtgtataatgtgatgatttgatatacatatacaatgcgtgatgattaccaaagtcaaattcactctttccattaccacccatgccatacatcagagccccagatcttgttcatctggagccaggaatcattctgtgcaagttttgaaatgtatttttaaagtttaataaataaaacatttattttatgtgtatttttgcttataatggtatgtattctttaaaaaatttaaatacaggaaagttgaaaggattaaataaaaactaaccactattctacatccaaagataatttcagttaacatttggtgtaaagacttcaaaatattttaaatatgcatatgtatacatgcagccatgcatgtttaattgtacaaagtaaaactgaaatctttctctatcatataccatgttctgttgtttactgatctataaaaaaaaaattcctaaatcattaaatgtttcaagagagttgattttgggtgactgcatagtagcccactctgactatagtattatttacttctgatattattgggaacagtgggttgctttcaagatttcagtattataaataatactagcatatacacattgcacattattctcttgggaaaaattcctggagatttacttggttttaaggctcttgatacaaattcaagccaacctttttaaaagacaacaatagaaatgtagcctgggaacagttcgtgtatattgaattcgtatttaacagcatgagcatcttttcaatttaacttcaaagttctagaagaaagaattggagtggagcaatggttgtaactaagccgagtgagagctaccgtcattctctctcactggtgagctcaacacggaggctatgacgggttccacatcacactcagaaccaaagtgttactggtgagtaaacaggcttccgtggcaaaacatttttatttgtgtctatttatgtatttgcagcagatcgatggcaaagccttcctgcttctgacacagacggacattgtcaaagtgatgaagatcaaactgggcccagcactgaagatttacaactctatcctgatgttcaggcattcccaggaactccctgaagaagatattgcctcaggccaagaagtcaggggatgaatgggctccctgaacttcctctggcaccaagacctgcgctctttcagcaataaaagtggagcacattaatttgatgtgaatgtccccatggccgtatccacactgaatctggactttttaaagtgtctgtgatttgtttacatgtttagaggattttgatgactggtccagtgccaatgactcagaggcttaggcccatctgtgggtttggtttacgaacattgttatctttggtgggatccgctcagctctgatttgtttgcaagacagaccaaagaagcccacacatccacctttattcttctccgtcaccagaaaagaaaccattttccatcttacaagcataacactctcaagtggtgaaatattagaaaagcagtgttcatgaatacatcgttaatgtttttaccagagcaacatcgagcttggctcagatctgccatggagcacagctagtctaagagctagaggcctggtgctttcaaaagacttcatgtgagatttttgtgtactttactcaggaaagtgtgaatctctaaaaaataataataataagcacatgttttcatgattcattaattctcctttttgttccattaaccatttcttggttgtgctcccaagctttcctggagcctccacaaaggagagtagccaggagtaatgagaggacggtcaggtgggcacttccaaaagctggagagacccttctgaggaccctccaccatcagcggggcctcaggggaccctgtcctaacactggtgtggctgctgggccagacgctcacctgcacagaactcctccctgctcccactctgaagggcgtttcagaattgactcatttccactgcagtctgccagaacccctgtaataaggagctgtgttatattacatctggggctgtgtgcatctttacaaatggagacacactattcaaagggaagatctctaaagtagggagcgtggtacttattctttgtttgaaacattccgatttgttgtcaggccttatttgttttttgtaagtgattgtatcggaggcttaagttgtgtggaatcagtcccacagtgttgaaagacaagtacctcttttctgacacttcttactacttttacaggtagtaacagctacaaatactctcccagaagtggagggacaccatttgtgggtggggagaaagagggagaggttctatgtccacttgcttcattaagaatgttaaggtttaagaaagttgattctgcttggagaatttctcaagctttacatttttttttcactgaagaaaataaacaaactctaagaggtgtgcatatataacatttctttagatctttacctaaaaggaattttaatatattattggttgatgtaaattttgtttctgtggagttttgtttgttttgctttttgtagactgccatgtgcaagtaaaattcctgcttctgccatgttaaaattttaatatattttaaatgataataaacagagaaaacaaaattta

SEQ ID NO: 12928 - DNA, 476 bp, Homo sapiens
ccttgtctctatttctattatttcctcctatgacactatgaaaaagtgagcccagcagaagaactggggcaatgttgccccccaggggcatttggcaatatctgggcatatttttggttgttacaactcagaaggggactttcctactggcacctagtgagtagagggcagggataccgttaaacatcccaccccacccaggacagccctcacagcaaagaattacctggcccgaggtgtcagtattgaggttgaggaacttggctttacagcattttcctgcgctcatctttgattcctgccctgcctagccctgaggctcagcatgagtctgtacagaccctgctggaccatttctctagcttcctgcagcgctgtggtccttggccctcagtgcacactggaaccaactgggaagctctaaaaatatctacccagtgcttggacccaatccaactccattaatttatcatctg

SEQ ID NO: 12929 - DNA, 6131 bp, Homo sapiens
gcagcaggccaagggggaggtgcgagcgtggacctgggacgggtctgggcggctctcggtggttggcacgggttcgcacacccattcaagcggcaggacgcacttgtcttagcagttctcgctgaccgcgctagctggtgagtgtcccttctgtgtgtgggtcctagagctcgcggtctggtctggtctggtccccagactgacgcctggtcggtccccctcttgtcttacagcggcttctacgctccggcactctgagttcatcagcaaacgccctggcgtctgtcctcaccatgcctagcctttgggaccgcttctcgtcgtcgtccacctcctcttcgccctcgtccttgccccgaactcccaccccagatcggccgccgcgctcagcctgggggtcggcgacccgggaggaggggtttgaccgctccacgagcctggagagctcggactgcgagtccctggacagcagcaacagtggcttcgggccggaggaaggtgagcggtgggcgggtgccgacgcgactcgaggggccgggaaggtacagaaaaggagcccaaagactcaaaagtttaaaaaaactgctcaactcaaacagctgcaagtgaccaacctggctgggacttaaaccagatctgtttgattctagaacgtactgcactacctttttaattaatagaatagaataaaatagaatggatttcttctaccagattttgtatttcatcactggcaagttctgccttccacaaaactcttggacacaatacaattcagccaagttgtttgcacctttataacaaggatagcttttcctccagtttccaacaacatgtttcttatttcacaagcatttaggtaatctctaagaatatcacggcttttctctacagctctcctcttctgagctctcaccagaatcacctttatggtccattcatggcaagccaggctttttccagcatgtacctccaaatttttccagcctctattcattacccagttgcaaagctgcttccacatttttaggtatttgttatatagcaacaacccacctgttgttaccaatttctgttttagtctgttcaggttgtaggacaaaatatcttagactgggtaatttatgaacaatatgaatttagcactcccagttctagagactgggaagtccaagatcaaggtactagcaggtttggtgtctggtgaggatctgtttgttcttcgtagatggcaccttctatgtatcctcacatggcagaaggggcaaggcagctccctgcaacctcttttataatgacactaacgtcattcagtaggatacagcctgcattgagcctaatcacttccccaaagttcccatctcttaatgctatcatactggatattggatattaggttccaacatgaatttggagtggagggtgggaacaccaagattcagaccatagctattatgttgctcaaagataacaacaaaaaattaatatttggatattatggttgtaagttatagtcataaagcacttaaaacattcaaaattttggagggttataaaatgttgagaaaactcagattcacataaactagttaagacgaattgtgtactactttccagaccactcaccttgcaatctcaggatgttctttattcaattaaacagtgatgacagaaataaacttacttcttagtcaggaaaattgagttaacctgcatacatggtaacaggcaggtaattcttcgagctgggttttttaaatgacggtttttgttttgttttgttttgttttgtttttttgagacagtccactctgttgcccaggctggagtgcagtgatgcaatctcggctcactgcaacctccgcctcctgggttcaagcgattctcatgccccagcctcccgtcttcaccacggggaaatataggtaatgtatttataattgttatatcaccttgatggaatgactcattcaaaatatataatgtccttcttagtttcttattataatttccgttttaaagcttattttgtctgatatagccatctctacttctttctgttactatttgcaggtaatggctttttccactcacaatcaatcttgtctttcaatctcatgcaagtttcttgtggacagaatatagctagatcatgtttttttaaaaatccattatgccggtacctgccttttaattgaagtgcaatgcatttacatttaaagtcattatcaataaggaatgatacacttctgccttaattttttttctgtttgttttacgtcttttatgtttttcagtcatgccattaatgtcttctctctgtttagttttcttttagtgtactattttgattcacatcttgcttccttttttgaatattttttagtcattttcttagtgtttaacctgtggattataagtaatatcttaaatttataagattctagttggaagtaaaacgaatttaactttgaaagtatacaagaattctgcttgtaatataacttcgtttctccccttttatattgttattgttacaaattacatctttataaattgcataccaattaacatagaattataaatttttaaaatgcattttcttttaaatcatatagaaaaaaggattagttacaatactaaaatgcaataatacttgcatttatatttgtctaagtagttaatttaaccagcttttaaaaatttatttgtatggcttcagttttctgtctagtatgtttttatttctgcctgaaggactccatttagcattttttgttgggtaagtaggtctactagcaataaactttgtcagcttttgtttatctggaaataccttagttttttcttcatttttgaagaatagttttggcagattcagttggtagttttttgttgttgttgttgtttgttttgttttaggcactttaaatatgatgttccattgccttctgccttctatggtttctgacaagaaatcagtggttaatgttattgaagatctcttttgtatggcaggtcacttctctcttgctacttccagaaatctcttcttgcctttgtcttttaacagtttgattacagtgtgttttggtgtgtacctctttgagtgtattctacttagagtttattgatctgcttggatgcatagattagtgtcttttatcaaatttgggaaggttttgtccatcatttcttttaacagtcttcaccaccccgctggaaggatccgcgcgggccttcaagaggaccgtctccacccgtgtgaagaacggatgctccattggtttaagtgatcagaaaactcatttggaggaattatgtgctttctctgggaatccgacataggaaactatgagaaggcacacacagttagttaaagcaggtctttgtatttgctcttattagaaagtttcaaccttttgtagatgaactcaagtgattattttggaagacagagcgttcttaggttggactgagttaactggatattcaccttgcttcagttagtgatgtggaacacccaggacaggaaaaagagaaattactacaatttaatatatattgggataaaagagctcaccttgatttatcactctgaacaaaaggggtcttccctccttggaatcccacactattaagggaatttctgttgagagtatcaattccagacagtgttgctccaatctgctcatcacagactgtcttggctgcagctctatgctgttggtgtgcatgggctgcacttggaaggtaaaacctttagggtggccagttctcatcatacagggctccctttgctaaccccttgcaaccacagacacacaagtctctgagtctctcagggaactttttggagctttggccaaaactatcattgcagtcatctttgacagcaccagcagaatcaaacttctctttggggtggctcaaaacttctcacctgcttttctgcttttgacaaaaaggcaacaattaaaacaaccaagcatcactcgtcctgaggacttggcccactgtcttcttgttctgagaatcaagaaagcaagatatggaagggataaacaccatgaacaggcgtcaatagcctgtgattataaaatgaagggcactataacttttaaaagttattctgtttttcatatgggtaatacatgcatgtgatatgaaattcaaaaggcactgaaaggaatgtagtgaaaatcttccttccacctcatttcccagatagttcctttccccaggtcttcaccacgggtggctcgtgttttcatcacagaggagagattagtgccctcatatcccacccacctctcctgtgcggtggtagtttttgacccagcccacccacccctaatctccctcgctatcataacctggggtaaaaggaaccgaaaattgtgttttttctctctatccaagctctacaggcgttagttggtgttgccttcatataaaaaaaaatgaggaattggggacaaaaaaaaaaaccctagggggtgttttaataacgaattaagagcggggataaagggttataggccacttttgagaaagaggtaaaaggccggcttttttttttctcacacccggtcaagaaataaagtgtggggggaccggtcactagggaaataacgccaacaaggtgaaatattttgcccaaggcagaaaagaatcctggttgttttaaaaaaaaaaggaacttcccgcccctgagtgaatgcctttggacccggttcagaacacccggccagtgagggtcacaagcaaattaccggtatttgggaaagaatatctttggggaaattaggcctagttaagggacctaggttttcacccctgtgtactacccttatcaaattgcttcaagaaaacttgggcccaggcgagtctgggctctagacgccctgggcgcctgttaatgcctagccagttggtaagccaggtgggcaaagcatggttgcgcctggcctatagcgaaccgtacggcgtccgggaggctctatagtacgtctgcgtgagcagggcaagagctgcctcagcgtgggccagctggcactcgaccccagcctggtgcccaccttccagctgaccctcgtgttgcgcctggactcgcgactgtggcccaagatccaggggctgtttagctccgccaactgtcccttcctccctggcttcagccagtccctgacgctgagcactggcttccgagtcatcaagaagaagctgtacagctcggaacagctgctcattgaggagtgttgaacttcaacctgagggggccgacagtgccctccaagacagagacgactgaacttttggggtggagactagaggcaggagctgagggactgattcctgtggttggaaaactgaggcagccacctaaggtggaggtgggggaatagtgtttcccaggaagctcattgagttgtgtgcgggtggctgtgcattggggacacatacccctcagtactgtagcatgaaacaaaggcttaggggccaacaaggcttccagctggatgtgtgtgtagcatgtaccttattatttttgttactgacagttaacagtggtgtgacatccagagagcagctgggctgctcccgccccagcccggcccagggtgaaggaagaggcacgtgctcctcagagcagccggagggaggggggaggtcggaggtcgtggaggtggtttgtgtatcttactggtctgaagggaccaagtgtgtttgttgtttgttttgtatcttgtttttctgatcggagcatcactactgacctgttgtaggcagctatcttacagacgcatgaatgtaagagtaggaaggggtgggtgtcagggatcacttgggatctttgacacttgaaaaattacacctggcagctgcgtttaagccttcccccatcgtgtactgcagagttgagctggcaggggaggggctgagagggtgggggctggaacccctccccgggaggagtgccatctgggtcttccatctagaactgtttacatgaagataagatactcactgttcatgaatacacttgatgttcaagtattaagacctatgcaatattttttacttttctaataaacatgtttgttaaaacagttggttgagtctctcat

SEQ ID NO: 12930 - DNA, 8645 bp, Homo sapiens
tttcaatataaatgtgtaattttaatatttaatttaaaataaaaccaaggctggattggattgggaaagaacgtttgatttgcagaagaatataggaatttttttaatcacgacattacaagtcatttgtgaaaacagccttcctcctgccaccggctccctatacaacctgcttaggaaatatggaggtgaatcatcccccttacctcttccctaccagggcttggttctccccaaaatccaaaggagaaataaatgtcttccgttgcctcttcccatttttacagtcagcttctaaccccttgcaaagccctgaatcagagccaagcacctcagaaaatgagggtcccttggttctcttattgaagttgggcacatgtggtcagagaagccccaaggaaggccacagggactgacacctttacttttggaatttgtgcagccagttgtcagggctcccaggtgcaaccaccttataaccatatccacagtcacagaggagggagaggaggaaggatgaaaaccctgagcaggaccagacccccgccactttatcatgaccctaccaaagtccctctcccaggggtcattggcagagaaaccccaacagctctctcaatcaatcactggggcagcagggaaggctgagggccctggctggggaaaagctggtctttggagaggtatgaatgtgcagatataaaaagcaagaagagcatccttatctccttgccttggctaaggcactgacaggaaaaatgcaaggtaggaatggcaaagaggggaaaggaagaagacaaaaatataggaactggaggggtatggggactaccacatgggccccatacttgtgcaaagaaatgggtagagccatgcctgcatgtctgttacccataacattcccctcaccctgctccagagtggaaggaaaatgagttgcaggaatccagggagcacaataacatagggtatttccctgagccttagggttaagggctaaagaataaagctttatacacatggcaatttctatcccttcctatccttctcagtccccatcagcctaatgctgaccatccttccactataagagagatgagggaggtgtcggcacttgaggaaaaggctcagttggcttgaaatgtccactcctacagtggaaagtccatctatcagcttattgctgatgattttttttttttatcaccatcactctgacccctccctgtcttaggtctgaataattgggtcacccataggaatgcagaacccagggtgggcagagcagagcagcacttgctgggataggcctcgagcctggtttctgagtccttgaggaccacgagctaacaggagctggtctgtaggttgctctccgtaagcagtgatgcaatggacgagggatcgtagacactgtcgaattcctcatctgagctcagcccttcgtttttgagagctgactcagcagctgagcgggaagctttgcgcctgactcagagagaagaataatggttggggaggggaaaatagaaatattaagacagccaccctttttgtacaaaggaaaccccaattcttctaaggcctaaagtttattcacaaaatccccaactaatcagatttggggaggtacaggatggtggctgagatactaataaataaatatactggcttccaaccagaaacaagtgactacacagtaccatgttagagattctcctccttatccagcacaggagagaccattccctccctgctctagtgtccctatggagcaagggcaaaagggtagcccataccaggagtccttctccagagacttgatccgggcctggagctgttcattgacctcatgctgctcctccacctcacgctgggccttcttcctcaggccgtccagtcgctcaatttcctcttctgcttcatccacctgacgcttcaaagccttcaccctcaggcttagctgggcaggataccaagtccacacatctgaatagcatctactaccatggcctgggaccctcccccataacaatcttgacaaggtataattgccgctggaaaaatgtggccttgggcaagttccttaacctcacatggttgtcttagggattaaatgtattaacacatgtgtaatacttacagaacctagcacatcataagcactcaatatatacgcttaccatgacttctctagtctagtcttttcaatctaatctctgtccttatacaaggaaagtctaagtttggaggacctataggagataagggcctcccttggctttcaggaaaacatataatatatacctgccccaggttgcttggctccagggtgccatgtcctcacctggtctttctggtcattgacatgctgccgctcgtcttcaatctggatggatagttctttaactttccgctccagttttcgattggtagactgcagaactgtcttctccctaaggtgaggtagaagaatgtctatgagtgtccccatttctaagggaatcctaacttggccccctactgtccccaaggactcctctcagccatgagctccaccattagactgggcaggatccagggcagattcaaagaatgagggagagtgacgtcattcacatttcagaatttctgcaacactctttgctctctatcaggagaaagtgttccctaaagatcaggccaggctggccatatctgaggtggaagatggagggagccacagaggagaaaagccaagagggagggaggaagaaaaggagggaggaagggaggaaggataggcttatgtcacctctcttcagcctgtagccgctcctgcaacaactgattctgggactcaagctgagagaggctggcactaggcttctggaagccttctgagctggccaaccgggtcttcaggtccttgttctgagagggacaggaagcctccacagttagcactccactggccattttactcacctcctggggtccatccctaagaatcctcccctcccccatcacctgtctctccaaggagattttgtcacactccaggtcctgccgagcagacctttcctgcatgagctctgtcctcagctgatccacctagtggggatgggtgagaggaccagacttggggagggctaaggatgaaccagcaagctgaacaaagtgaggctgagtcatgggaggatggtctctgaaccctgaatccaaaaattcccaggcaactaaaaaatcacagcctattcaaatgggaggggccagagaatgcaaacagagcctccttcgtccctccaggaactagtatcccttgtaaaccaaagaagccccaattcaggtcagagaacagcccaggccaccaggatcccttcctccatgcaaatcattggcttctttccacccaaggaaactggccaacctttcccaaagcagacaaaaccctgaaggagacccagccacgcacagattcggcagccagatgatgaaagatgggagggtagagttgtttttgagagaaccaagaggtgatgcagtcaggggtaaacagagatgaggggtgggggcggttacctggtcccggccacgattcacccgatctgttagcagctccacggtgttcttctcctcatctaactctgtttccagccgtgagactttttcctaggacagaagaacaagtaattctgtcccaaatgctggacaccagaatgccaaactcagaccaggagcctctcaaactccagcattaacagacttttctctcttgcacatcccagtaaccttttggtacttgcctggacccagagccactatggagccagcgccctctactgaccagatgtggcatcatgggcaggtcggggccatgctctggtgacggccctttgacagaaaggcaaaccccagaatctactcttcattggaaaaccttatttctctaatgggaaaagagagagaaacccaagtacctgggccaaggctgaggtgaagagactcagaaactgaggtactggaggcagtaccacgtagaggctaagagtatgtacatgggaccagactgtccagtctgaaaatcagatttaccacttcctggcagtagaccatggacaagttcatctctctgtgcctcagtttccttcatctgtaaaatggagaaaacaagactacctaccccacagagttattctgaggattaagtcttaagtgcctatcacacagcacaatatgtttgctgctgctattattattatcaaatatagcaaactgaagaatactgttcactctaaaggggaaacccactgctcagctccagccaactgttgccatgcagactcaggacaagacactcagtattaccatatctgccaaatacaaaagaaactagaaatccaaatttttaggtgacctctataaatttctaaacattggcaattgattcaaagttgttgaaaatactgcagccaaacaaaactcatcaactgtgggctgtcggttttgaccgctagtacagaaagaggcttggaagtcccaccctttttccacaggtcacacctcagtgccctcacctcgagacccttcagctgccgggccctgtcgtcctgggaacgcttcttgttctctgcctcttgctccagcccctgcagtcgctgggccagtagctctttgtccagccgggctgtgtcccgctcagcctgggatgcctgcagggcctgccgcagcctctggatctgggcagggggtaaaaatgccacagctcagtgtagtgagaaggtgagggttgaggggcaggagcagtccagcccagtgggcagaaacatttcatcactgtcactctttagaattaccagtggcatgatgacaataaaaagcaaactgacttttcatccattttctttttttttcattttttagatggagtctcgctctgtcgcccaggctggagtacagtggtgcgatctcagcttacagcaatctccacctcccaggttcaagtgattctcctgcctcggcctcccgagtagctgggactacaggcatgtgccaccacgcttggctaattttttgtatttttagtagagacggggtttcaccgtgttagccaagatggtctcaatctcctgacctcgtgatctgcccgccacagcctcccaaagtgctgggattacaggcaagagccactgcacctgccctcattaatttcctttattgtttttgtttttgttttttgagatggagtcttgctctgtcgcccaggctggaatgcagtggcacaatcgcggctcactgcaacctccacctcccaggttcaagcaattctcctgcctcagcctcctgagtagctgggactacaggcatgcaccaccacgctcagctaatttttgtatttttagtaaagacaaggtttcaccatgttggccaggctggtcttgaacacctgacctcatgatctgcccgcctcagcctcccaacgtgctgggattacaggcgtgagccaccgtcctcagcttctttattgtttttaaagtctctacacaacttggaatcacctgaggagtttttttaaattctgatcctggatcccatccccagagatgatgactgaagtggtatgggatacagcctgggtgtggggatttttaaaaatctcctcaggtggctctaagctacagaatttgaaaatcactgctctacagacaatatattcctccaccctgcaagtcattagacctaaacctgggccccagggacccttggccacaggttcagttaagaggcaaggaccgggctgggcgcagtggctcatgcctgttatcctagcattttgggaggccgaggagggcggatcacgaggtcaggagattgagaccatcctggctaacacggtgaaaccccgtctctactgaaaatataaaaaattagccaggcgtggtggcaggcacctgtagtcccagctacttgtgaggctgaggcaggagaatggtgtgaaccccggaggcagagcttgcagtgagccaagatcgcgccactgaactccagcctgggcgacagagtgagactctgtctcggacaaaaaaaaaaaaaaaaaaaaagaggcaaggaccttcaaacccaaggatattagacttctacctcatcctgaagtcggctcagtcctccagaggtcttctcagcctcactggcccaatccttggcctggcgctgggcatctgccacctcccgccgggccttttccttataatcctccagctgggcctggagctgctgcagggcttgcttagagtcctccccgatcttctccaactgaaacacagagaaaagggtcttcagcactgtacataaatgaccctctccaggcccagactcccaagactctcccctaagggtctccttcctgacaaggcagccctctcttgctctttcctgggcctaggttcctagtatagctaatagttatatacagatgtctgggttcaaatcctggctctaccacttactggtgaccatgtgcaagttacttatctctctgggtctcagtcccccatctgtaaaatgggattaaaaatagtaactatatcacaaggtgttgtgagaattacattagttaattatgtgaagttctgtacttacaacagtgcctgatacaaagtaagccttaaatgaccatttcagcaaacccaaggtgccaatgattatacggcgtaccactaagaaaaatatgccaattaaactataacataccataaggtataagacacaactctatttcagaaatgataaaatgtgcatttttcattgacaaatgataagatgtgcatttttcattgacaaatgataagatgtgcatttttcattgacaaatgataagatgtgcatttttcattgacaaatgataaaatgtgcactttagaattgatgtaacatattacgtgtttgctcttgctttacaaaaagattgggaggagaaccttagcagcaaaagcaatttatttccttttcttttttctttcttttctccttcccctcacccaaatttaaaattctaccaatgaagatttttttttttgacaggctcttgctgtagcgcagtggggcagtcacagctcactgcagcctcaacctcctgggctcaagcaatcctacgtcagccttccgagtagctgggaatacagatgtctgggttcaaatcctggctctaccactaattagcaaccataggcaagttacttatcttctctgggtctcaattccccatctataaagagaaactgaggaacaagccaccacagcaggctaattttatttttaagtagagacagagtcttattatgttgcccaagctggccattgaagattcttgtatttaggttttgtagactcccaagggagaatcccaggagatgttctccaagaatgaagaccataaaggaataggatgtaagggaaagagcaaaaacatggaggggaggtaggaaggatgccccttccagaagatttggtcttggtcttcctaacaatgaacttgaggaaagcaaacatcacacattctttttttttttttcttaagacagagtcttgctctgtcacccaggctgaagtgcagtggcatgatctcgcctcactgcaacctccaccttccgggtgcaagtgactctcctgcatcaccctcctgagtagctgggactacaggcatgagccaccaagcccggctaattttttgtatttttagtagagacagagttttgctatgttggccaggctggtctcaaactcctgacctcgggtatctgcctacctcagcctctcaaagtgctggaattacaggagtgagtcaccgcacctggccataatcatcacacattctgactaacccctctcccccaagcccctgtcctctcaggccagcttctggatgagctgggcctcttcctaaaggcccagaataccccatgccccacctccttgttcagtcggtccacagtcctgtccagcaaacgcttctgctcctccagctcagccttgcctcgccggagcacctcccgctgcttcccttcctcctccagggcccggttcagtgtctgctgctcctgccccaggcgggccagcccccgctgagcctcctctaggcgtgcctccagtgcccgcttggctgctgccagactcccctcctcttcctgggacgcattcagggcctcctccagctgctgtttctctgcctgggaggtagggaagcagggttggactgagaaaaggtaaaacttgggttcaagtcatttggaggtgggtagctgggcaggagaaaggaggtatttatgaaaatgatgtgcaatgaaaacaggctcctagcaaagaaatcaggacacatagagcaagcaaagggtgagaaataagaaacaaaactaccagtgcaaagactgaacattggcgccaaagtatacaccaggaaataaacccaaggttaacagagcaggtttggggaggcaaaacagatgcacactaagggcaaagtgaaactgatggctaactacttagcataggagtatttcaccagggctgagcagagagggctgggagggcagaaccactgacctccagccgctgcagcttgtcccgtagtcgtgcctccaccgcttccccaccatccaccagacctcgag

SEQ ID NO: 12931 - DNA, 112 bp, Homo sapiens
aggagaatcgcttgaacccgggaggcagaggttgcagtgagctgagatcatgccattacactccagcctgggtgacagagtgagactccgtctcaaaaaaaaaaaaaaaaaa

SEQ ID NO: 12932 - DNA, 5262 bp, Homo sapiens
ctcccgacctcgatcagcctcgaccctcaggaccgccagctgcttctccaactcccggtcccggtgtcgcccagccacctcctggctctgccgttctgcctgcagttccttaagctcctcctgtgtccggagcagctcctggaaggaaacgggaatggtgatggggcacccagagccagactaagatacctgaatgtggagaagctgaaactctcatacactgccaagggaataaaaactgatgtggccactttggaaagtagtttggcagtttctcaaaaagttaaacacagatttaccatttatatcaccagcaattccactcttaggtaacccaagagaaccgaaaatatgtgttcacaaaaaaacttatacgcgaatgttcatagtagcattattcattatagcccagatggatacacaacccagatgtccacgaattgatgactggactaaacacggtatacccacagagtggaatgttattcagccataaaaaggaatgaagtactcatacttgctaccacatggacaaaccttgaaaacactatgctaggtgaaagaagccagacccttaaggcccatatattataggattcaattatattaaatatccagaataggtaaatccagagacaaaaagtagattagtggttgccattgggtggggggaattattgctaatgggtttggcgcctttgagggggtaatgaaaatgttctgtaattaaatagtgatgatggttgtacaactttgttaatataataaaaaccactgggggccaggcgccagtggctcatgcctgcagtttgggaggctgaggcgggtggatcacctgaggtcaggagttcaaaaccagcctggacaacatggtgaaaccctgtctctaccaaaaatacaaaaattagccgggcgtggtggtgtgtgcctgtaatcccagctgcttgggaagctgaggcaggagaatggcttgaaccagaaggcagaggttgcagtgagccgagattgtgccactgcactccagcttgggtagcagagtaagactccatctcaaaaagaaaaaaaaaacccattggattgtacacaaagatgacttttatagcatgtaaaatataactccataaaaaaaaaaataccatgaagggagagtacatgaaggtatggctagtaaggctggttgtttaaaaaaaatacagtgtgaggctgggtgcggtggctcacgcctgtaatcccggcactttgggaggccaaggagggcggatcacaaggtcaggagatcaagaccaacctggttaacacggtgaaaccatgtttcacggtgaaacactgagtacgtgtattttttttgtaaaaatacaaaaaaaattagccgggcgtggtggtgggcgcctgtagtcccagcaactcgggaggctgaggcaggagaacggcgtgaacccaggaggcggagcttgcagtgagccgagatcacgccactgcattccaccctgggtgacagagtgagactccgtctcaaaaaaaaaaaaaaaaaaaaaaatatatatatatatatagtgtggccatgggatctccaactgcatgcaagagcaacctggagagactttgacagaacaggtcagcacaatccctgcagctgccacttgtctttcgtgtgtgtgtgtgtgtgtgtgtgtgtgtgtataaaaccaaaatgtgtgacacaataaatgctggcacagctctgatttcttttaaaaagaaaattaaaataggagttctggttctaattattagctattagctacttctgaaattcagaaagtaccataattaggctaaagggttatataatatgtagtgaatcttcaatgtaataccatatactctgctatttttcttttgctaattagttttgttacattagtaaccaggccatgccaacacaagtattccagtccatgtgatgatatttctcaatgtaaattaataaactgaaattctaatggtaaacattttttcataaatgtagttagagacccctctgaaagacaaagcagcttttgccatgctgaccaaattagatttctgagcctgcaaaaatcatcctggagtttcacaaatccacctaaatgctgctacccatgacgtctcttgggagtcggccagcagcctctggctataccccaacctgggttctgagagcactttccattagaaacctctatgctcaatgaggagactggtgctgctgtgctggaaagagatcaagctgagcaggcaggatgaggcctggaaaccaagcacacaggagatagccccactagcaagaaggccctcatggagaggtaaggcaggtgttcatcacccctacctaccattctgccccccaattcccaaataccttcttgagcacctcaacctggcgagtatctccagcactagctcgggcctgctctaattccctctgcaagacctctatcttctctccaagctcctcttccatctcctccttctccattcgcagctgcaggagtctgagccaggcaaggtgaaataaaggggaaagggaacagagtaaggccacatgcctgggggaggttagcatgacaataaaagccacctctctggaggccaacacgctgggcaccaactctcaagaggaaggaaggtgaacgtggaaaagagcagtttgagaaatgggagagtaagagcataccatagatagaaaggaagtgggccaggcatggtggctcatgcctgtaatcccagcaatttgggaggccaaggcagatggatcacttgagcccaggagttcaagaccagcctgggcaacataatgaaaccccgtctctacaaaaaatacaaaaattagccaagtgtggtggtgcatgcctatagtcccacctattcgggaggctgaggtgggaggatggcttgagcccaggaggtggaggttgcagtgagcccagactgtgccactgcactccagcctgggcaacagagcaagaccctgtctcaaaaaaaagaagaaagggactgggtgcagtggctcacgcctgtaatcccagcgttttggggggccgaggtgggaggatcacgaagtcaggagttcaagaccagcctggccaatatggtgaaaccccgtctctactaaaaatacaaaaaacccaggcctagtggcaggcgcctataatcccagctactcgggaggctgaggcaggagaatcgcttgaacccaggaggcggaggctgcagtgagccaagactgcaccactgcactctagcctgggcaacagagtgtgactccatctcaaaaaaaaaaaaaaaggagaaagggggccaggcgcagcggctcacacccgtaatcccagtgctttgggaggcaaggtggacagatcacctgaggtcaggagttcgagactggcctggccaacatggtaaaacctcatctctactaaaaatacaaaaattagctgggcgtagtggcatgcgcctgtaatcccagctacttgggaggctgaggcaggagaatctgttcaactcaggaggcagaggttgcagtgagccaagatcgtgccatgacactccagcctgggaaacaagagcgaaactctgtcccaaaaaataaattaaaattaaaattaaaattaaaaattaaaaaaaagaaaggaagtggcatatgaatcatgggtatttctgagagggccaatgtccttactcctgcttggtggctctaagatcctccttgttcttctggaacatactctgccaatgccctgtctcctctgaagtctcctccagctccctctgcagccctcgcacaagggctgacatcttctgcctctcggcctccagcactgcatggtcctagagaaggggagagttggacaccagaaggctcagagggaagaggtcacttcaaatcaaagtgtgagtgtgtacaaggaaaggcttagacccagagggcaccatgccaggtgcaccccctgacactcttgtggtacctggtacaatgctagcagagattctctcctcaagtcacagtccacccctctatcatctacaggaaacctccccagttatttccccttgggactttttatttttagggggacagagtctcgctgtgttgcccagggtgaagtgcaatggcatgatctcggctcactgcaacctccgcttccttggttcaagcgattctcctgccttagcctcccaagtagctaggactacaagtacgcatcactacacccagctaagtttttgtatttttggcagagatggggtttctccatgttacccaggctggtctctaacttcctgagctcaagcagtccacccgcctcagcctcccaaagtgctgggattacatgcatgagctaccgcacccagtcccccttgggacttttgtcacacaacctcaaggtacttctggcctgtactccctccctctgcccctatagttttcctgcccaaggttttcagcagatctcactgtgtcctttaggaggagagggggagttcccagttgcaaccatgaaaagtccaaaagtccaagatcccaaggcagccttgttctccagcagtgccctcctctctcagaccctgctcttgtcacatgcctgggttgcatcttgcatgctcctgcggagctgctctgtgtctcgctggtactgctgccggacatgttccacctcctggtcacgggaggctacctcctctttcagggcccccttcagggctgtcaactcccgctcccgcagcctcagctgctcctctactcgctgtttcccctccaagacctcttccagaagttcccgggtctctaacaggtcctggagaaaataaaggaagaagtacaggggtgaccatattagaatccatctgtttatcaattcactgagtcaaaaaatatttatcgtattaggcacagtaccaggtgctctagtaccagtactggagcccagaatgataggtttcctttatcctaactctagtcccaacacaccattgaatctacctgaaagcacactgagtacctgtaatcagccacccactcctcatactttggggaaaccatggatgagcagacttgaggatgctccaactgagaaaaagcagaggctggggcatatgaccccagaccctaccttcagtaacacctccttagcaggctcaggaccctggacatgtttcagcttgttctgcagctccatcacctgggtctccagcccatgtcgtaaatcttcaccctggtccaagaggcgcttcatgttctggagc

SEQ ID NO: 12933 - DNA, 2216 bp, Homo sapiens
gctactcaggagactgggcaggaggattgcttgagcccaggaggttggggcttcagtgagccatattcacaccactgcgttccagcctgggtgacagagcaaggtgctatctccaaaataaataaataaatgttaaatttgcttttttctctctctctttttttatgtagaatttgtttgttgatacttactgaatgtagtgaccctgctgtggtaatgaacacttctagtgccttctaggcttaaaataccagacaaccccaaataacaaatgctcttttgtgttttgataggttggatttctgtttgcttaatattgggaatactgggggaaaaaaagatggtgttttcattctaaggattgtcctaaagaaagtgctactttatttttaagaaagtaaggccacttgttatataagaaataacaagttcccattgggtcccattttgcaaaaggggataaagaattagactgatagcatcatacgaggcatatttcactatacaaagtgttgtacacctgtctatacaactctcctacccagcttgacctcacttttcatacctgatgcagcaaacaattcagtgccataggagaaggaagcagcatggttataagtgactaacacgatattaggcaatttgtccaaatttctcattttctttataggtaaagatagcattcttatttgattaattttttgttccactggctttgaaagacaaacgattgttaaagataaaattgtttttgttctttttcttataggtccttcagtcttggagactataagggagcctctgcacccagggaaaatgttaccctttacaggggggaagggtaaaccagtagggaatacagtacaatcccaaccctactgggaggggcgggagggaggtgttgccgtcactgtattaagtcgatgttgggaaacgttttaacatctggagcctttgtgggtggaaatatgtctccagttacaactccgcagtggatgtgaagaagcaaaaaaaaaaaaatctattcagtctactcacaaaacagtacattgtggaatattatggggaattgtaccaaaacaagaaccatataaatgatgcctagggacaagaaagaggaacaattctatagcgcacaataaaggaaacctaagaatgggagttacaaatagtaaagaagcttttttttttttttaatttaaagtttttttatgtaagttttcccacatgatggggccttgttttgcatgttgatgaagaactacacaaagaaaactaatatagttaaaagtcagcttgccttcccgtagtagaagcaggttcttggaagttacaatttaaggtaccccaaaaaagttggaaataaaacaaaacaaacataaacaatgaagcaccctgtgaaatgccaaatgagtcactccttttaccttttttggggtgggcagggagggaggaataaatggggttgggcatatcaaactaaagatgacatcttaattttgcattgaacattaatgtagcggatataatttgatgattatacttcattagatttaatttctaggccaagatgttactttttaaagtgcagtttaaggttcaggcatgcattctggctcatagtggttgaaagtaatttaaattagtgggaaagtagcatgcttgcatcacttagagtgagattggtattcatttacctatgttgcgccagtttgtgttgcagtttaccaattcaatatagccctgcatttaaagttcctttttaagatttgtggattttatttttattaagaacatagatatataaagtactgtagtttacaggtaggccttgaaatatcttttttaggatctgttaggaataagattgatattgtattgtgtgtaacctgcacaatgtggaaagctgatatacctgtgcaaaatctttgcctctgtgctgtcagtgtgatgtgctttctgcatggttatatactactagtgattttatcaaaacttctaaaatttaaattacgtggtaaaagatctgtaaaaggctgcataaatgttagttggcacataaagacaattgtagaagttgaaaaatgattgctatatttcaatgtttattcccactcaacatactgccttctaagcttccctttttttgttcaagcatgatcttacagatatgtttaagttaatggatgtaatgcagggttctacactgtatttgg

SEQ ID NO: 12934 - DNA, 3607 bp, Homo sapiens
gctactcaggagactgggcaggaggattgcttgagcccaggaggttggggcttcagtgagccatattcacaccactgcgttccagcctgggtgacagagcaaggtgctatctccaaaataaataaataaatgttaaatttgcttttttctctctctctttttttatgtagaatttgtttgttgatacttactgaatgtagtgaccctgctgtggtaatgaacacttctagtgccttctaggcttaaaataccagacaaccccaaataacaaatgctcttttgtgttttgataggttggatttctgtttgcttaatattgggaatactgggggaaaaaaagatggtgttttcattctaaggattgtcctaaagaaagtgctactttatttttaagaaagtaaggccacttgttatataagaaataacaagttcccattgggtcccattttgcaaaaggggataaagaattagactgatagcatcatacgaggcatatttcactatacaaagtgttgtacacctgtctatacaactctcctacccagcttgacctcacttttcatacctgatgcagcaaacaattcagtgccataggagaaggaagcagcatggttataagtgactaacacgatattaggcaatttgtccaaatttctcattttctttataggtaaagatagcattcttatttgattaattttttgttccactggctttgaaagacaaacgattgttaaagataaaattgtttttgttctttttcttataggtccttcagtcttggagactataagggagcctctgcacccagggaaaatgttaccctttacaggggggaagggtaaaccagtagggaatacagtacaatcccaaccctactgggaggggcgggagggaggtgttgccgtcactgtattaagtcgatgttgggaaacgttttaacatctggagcctttgtgggtggaaatatgtctccagttacaactccgcagtggatgtgaagaagcaaaaaaaaaaaaatctattcagtctactcacaaaacagtacattgtggaatattatggggaattgtaccaaaacaagaaccatataaatgatgcctagggacaagaaagaggaacaattctatagcgcacaataaaggaaacctaagaatgggagttacaaatagtaaagaagctttttttttttttttaatttaaagtttttttatgtaagttttcccacatgatggggccttgttttgcatgttgatgaagaactacacaaagaaaactaatatagttaaaagtcagcttgccttcccgtagtagaagcaggttcttggaagttacaatttaaggtaccccaaaaaagttggaaataaaacaaaacaaacataaacaatgaagcaccctgtgaaatgccaaatgagtcactccttttaccttttttggggtgggcagggagggaggaataaatggggttgggcatatcaaactaaagatgacatcttaattttgcattgaacattaatgtagcggatataatttgatgattatacttcattagatttaatttctaggccaagatgttactttttaaagtgcagtttaaggttcaggcatgcattctggctcatagtggttgaaagtaatttaaattagtgggaaagtagcatgcttgcatcacatagagtgagattggtattcatttacctatgttgcgccagtttgtgttgcagtttaccaattcaatatagccctgcatttaaagttcctttttaagatttgtggattttatttttattaagaacatagatatataaagtactgtagtttacaggtaggccttgaaatatcttttttaggatctgttaggaataagattgatattgtattgtgtgtaacctgcacaatgtggaaagctgatatacctgtgcaaaatctttgcctctgtgctgtcagtgtgatgtgctttctgcatggttatatactactagtgattttatcaaaacttctaaaatttaaattacgtggtaaaagatctgtaaaaggctgcataaatgttagttggcacataaagacaattgtagaagttgaaaaatgattgctatatttcaatgtttattcccactcaacatactgccttctaagcttccctttttttgttcaaagcatgatcttaaagatatgtttaagttaatggatgtaatgcagggttcctacactgtattttggcgcatgttggtggccctctgtgccctagatatatgcacacagggtgcaagttaaaagctacagagtgaaagttggtttggatcctcttcatttcatttgtttagcttttctgttatttttctctacttacatgtattcctgtgaataaatccttgttaagttaaccctttacttttccttccatgtgtattttcttatatactgtgaatgtgaaaacctaactggtacacttgatcttgtgttcatatgaaagtgcaagtctttattaatttggattgcctgaacagtgtatcccatgatgatgaaggaaaatggagagatttttctttttaactctgctggtcagagatgaagccacgcctttccatttttcaatgctgcatatttaatctgcaacaaaaatgttaagccataacagcctttttatattttagtttgtcacctttgcattgcagaataaatactgaataaccatttttataagcagttgctcctctttgcatggttctattctctaaaagtgttgaatgatacagccattgcactgaagtttgagctgtgtgcgtgtgaatttatactgtttcaaaaatttcaaatgcatggtagcatgtagaaaggtttttgttactatgtgtgtgtgtgtgttttgttttgttttgttctgttttttaacgttctttcacctttcctctactttggctttgcaaatttcagtctgtagagcctgaaattaaattattttatagtgcctgatatttttaatattataagttggattcaaagggtatacagcattttgttttctagtaccattgcttcactgggagctcaaaatttgcctccctgttagtctttaataactgagtagagtagcttttttattcttagattatagtgatattctgtagtgcttcaaatacttagaattctaatatgagagatagtttaatattctggaatagagagtattttaaattgaaatgaccaaattcgatttaaaacaaacacataacaatcttcagtaaagttatttgaacctgtggttgacaattctgtattgactaaaggcaatattgtcacctgtctcattaaaaattagtttccagttaggcagatgaataacactattaaaaatgcacccagttttgtagtcacttgactttttttttttatttaaatgaaatttaatttgaaaatagaaaataaaattaggtaaatatgactggcaacttgaatttgagttgggattctttgtgtatttttcccccttgaggttattgtttcttcctaatttatatttcagatacatagtgtagaacaggaatttgcagaagccatttaagttatcttttgaggtaagctctgatttagcatttattctgataaa

SEQ ID NO: 12935 - DNA, 10685 bp, Homo sapiens
tcttgcttgttacaggattttatatttttttgtgatgccgttgcatcatggattaacccaaaagatgatctcagagacatgttctgtaaggtaactaataagtctttataatgcatcatcttgagactgttaatatcctagtggaaaactttaaattatgtttacattttttgtgaaagttaggctcttcaagtcagtattgatagtttacatatataacctttattcttggtaacaaagttggcttgatcttttcttaaaatacagcagtgactcttatctgtagaggatgcactttgaaagtattttcccaagtgtaccactagtttaggtggtcccattattccatttaaggaaaatagtatatgtttttcaagatggaaatggagacttggagtataatctgaaaaagagtaaatctaaatggctgccacaggagtaagcccatgtcattatttgctttgttaataccctcttttgattaactcgtcagtactcaaccacagtaaaaaataaaatgcagttacacatttgaatcacccaagattaaagttagtgaactatagtttgtcatgaactcaaagcttgtgtatttgcagtttgaaaaaatacgacataaaaattgtattgcttggatgacttctctactttatcttttcattagtatggtatcagagattgcttagagtatatctgttactggaacacttgccaaagtctaaacttctcaaagcagagtttaagcatatgctatgaggtacttttaggcaaggcacgtgtattagtccatattcacgctgctgataaagatatgcccaagggccaggctcagtggctcacacttgtaatcccagcactttgggaggccgaggcaggtggatcacctgaggtcaggagttcaagaccagcctggccaacatggtgaaacgccatctctactaaaaatacaaaaaattagctaggggtggtggcggatgcctgtaatcccagctactcaggaggctgaggcaggagaatcgcttgaacccaggaagtggaggttgcagtgagccaagatcatgccgttgcactccagcatgagcaataagagtgaaactctgtcccccccacacacacaaaaagatatgcccaagactgggtaatttacaaaagaaagaggtttaattcgactcacagttccatgtggttggggaggcctcactgtcatggtggaaggtgaaagacaagtcttaaatcgcagcaggcaagaaagagaatgagaatcaagtgaaacgggtttccccttatcaaaccgtcagatctcatgagacttattcactaccaccagaagagtataggaaaaactacccctatgattcagttatctcccactgggtccctcccacaacacgtgggaattatgggagtacaattcaagatgagatttgggtggggacacagagccagaccatattagcagggaatggtgtagaatcctacgaagtttgagaattgctactttaaaatggataaaatttataaaaaaatcagctgtgttagatttcagaagctatgctgatctgaatttttctcttgttattgataaattaatggtttttcactcttacagatccttcatggatttaaaaatcaagttggcgatgaaaattggaggcgtttctctgaccagtttcctcttcccttaaaagagcgtcttgcagctttttatggtgtttaatctaatacacttaagctgcagtcccaaaattaggggtaagttataagaagtttggaaattttcaggatgaagaaaattttgttagggctgtcatttcaaactactaaatagaataaaaagctatttgttttctatagaggttgaataaaacatagcctcatatcattctatcttgggctttaaatttaaaattacttaagtgggccaggtgtggtggctcatgtctgtaatcccagcacttggggaggccaaggtgggcaggtcatttgaggtcaggagtttgaaaccagcctggccaacatggtgaaaacccatctctactaaaaatacaaaaattagccacgtgtggtgggacgtgcttttgtagtccctgctactcaggaggctgaggtgggaatatcgtttgaacctgggagatgggggtagcaggtgagccaagatcttgccagtgcactccagcctaggggacagagcaagactccatctcaaataaatagaaaataaaattactcaagtgaaggctaaagaaattttcttaatagaaccaacaagcccagaaaaacgattagctccagtttgaatcgtaggtataaagaaatccacgttggtacactggttggatttctcaacattgcttcaactattccttttttctttcttttttcctgcaagaagacatcggcactcatagtgatggggtaaaattgatttcattttggagcatgaatttatagtctctgctgtaacaaggacttttcatttcacgtgctttgaaagaaaactcagttgggttttggcccactgtttttgtttttcactgtatgtttcactgagtacctaccatgtgcccatcactttttttttctttttttttttttttttttttttttttttgagacagagactctttcgcccaggctggagtgcagtggcgcaatctgagttcactgtaatctccgcctcttgggttcaagcaattctcctgcccgagcctcccaagtagctggcattacaggcacatgccaccatgcctggctaatttttgtatttttagtagagatggggtttcaccatgttggccgggctggtctcgaactcctgaccttgtgatgcacccacctcggcctcccaaagtgctgggatttacaggcgtaagccactgagcccagtgcctaggactatattttaaaataagcaatgaaagattctgttttaatttgggatggactatattcatttggactcttgctccttgagctcttctgtacttaaatgggactagcagttctcatctctgagcttcggttttgtcattgagttatgttgaggattaaatactatactgtatgtgatgccagaacttagtatgttgcctggcacactaagttgactcagtaaaggttaggaactgggccagtacaataaatatcagggttttgacattcatctttagattttcaacatgaattaagacatatctgactggaagccagaagatgtgctgaatgagcatgtacagaagatgtacaccaagttgaattacactttagattgaattggaggagtttttttggcttgcttgcttgcttgtttactccaagctaaaatttaaatctggaaagatttcaccatccaagctgtctaacctagaaggtagtagaaatggactcaaagcttccagaatgtgtcagagcccttcatatgtgttgtcctacttcagtcttgagtcctcaagagctgttttccaaaatggctttggcattttggaaaagtgctggattcaccttatgttaaattatgagaatgcaaaagatgagaatgacttgtagcttcaaagcttcaatgagctactaacaagtcttgagcactttcagatttattacctctgtggtctcatcaccaatcatgaattaactgttctaagacaaggtatgaaatagttctcggttttgtaattagagctaaaagtagatcagtatcttttattcctgcctttttgtactcctcttccttttcttcagaggcaggagaaaagggattgcttatatttctacacagatggattaactgccctctgtgaattcacatgaacgttcataaatggccaaaacttggcatgattgggtagtagagttctgtttgtaaaaggaccactatcaggtaacagtttaaatctcccagtaatcttaccttatttcttaatatcctttttatcattaaaactgtttagcatagaaaaaagttcctaccagaaaaaccaagtgactggaagatagtggaaatgaccaagtgaaataggatcagaatgggaactaattaggaacatcaagaaggcaagtgtaggcagggtgtgatggcccacatctataatcctagcatttcgggaggctgaggtgggagcattgcttgagcccaggagtttgagacctgcctgggcaacatgatgagacctccatctctatgaaaaaaattaaaaagaaaaaaatgagctgggcatggtggtatgtacctatggtcccagctactcaggagactgggcaggaggattgcttgagcccaggaggttggggcttcagtgagccatattcacaccactgcgttccagcctgggtgacagagcaaggtgctatctccaaaataaataaataaatgttaaatttgcttttttctctctctctttttttatgtagaatttgtttgttgatacttactgaatgtagtgaccctgctgtggtaatgaacacttctagtgccttctaggcttaaaataccagacagccccaaataacaaatgctcttttgtgttttgataggttggatttctgtttgcttaatattgggaatactggggggaaaaaagatggtgttttcattctaaggattgtcctaaagaaagtgctactttatttttaagaaagtaaggccacttgttatataagaaataacaagttcccattgggtcccattttgcaaaaggggataaagaattagactgatagcatcatacgaggcatatttcactatacaaagtgttgtacacctgtctatacaactctcctacccagcttgacctcacttttcatacctgatgcagcaaacaattcagtgccataggagaaggaagcagcatggttataagtgactaacacgatattaggcaatttgtccaaatttctcattttctttataggtaaagatagcattcttatttgattaattttttgttccactggctttgaaagacaaacgattgttaaagataaaattgtttttgttctttttcttataggtccttcagtcttggagactataagggagcctctgcacccagggaaaatgttaccctttacaggggggaagggtaaaccagtagggaatacagtacaatcccaaccctactgggaggggcgggagggaggtgttgccgtcactgtattaagtcgatgttgggaaacgttttaacatctggagcctttgtgggtggaaatatgtctccagttacaactccgcagtggatgtgaagaagcaaaaaaaaaaaaatctattcagtctactcacaaaacagtacattgtggaatattatggggaattgtaccaaaacaagaaccatataaatgatgcctagggacaagaaagaggaacaattctatagcgcacaataaaggaaacctaagaatgggagttacaaatagtaaagaagcttttttttttttttaatttaaagtttttttatgtaagttttcccacatgatggggccttgttttgcatgttgatgaagaactacacaaagaaaactaatatagttaaaagtcagcttgccttcccgtagtagaagcaggttcttggaagttacaatttaaggtaccccaaaaaagttggaaataaaacaaaacaaacataaacaatgaagcaccctgtgaaatgccaaatgagtcactccttttaccttttttggggtgggcagggagggaggaataaatggggttgggcatatcaaactaaagatgacatcttaattttgcattgaacattaatgtagcggatataatttgatgattatacttcattagatttaatttctaggccaagatgttactttttaaagtgcagtttaaggttcaggcatgcattctggctcatagtggttgaaagtaatttaaattagtgggaaagtagcatgcttgcatcacatagagtgagattggtattcatttacctatgttgcgccagtttgtgttgcagtttaccaattcaatatagccctgcatttaaagttcctttttaagatttgtggattttatttttattaagaacatagatatataaagtactgtagtttacaggtaggccttgaaatatcttttttaggatctgttaggaataagattgatattgtattgtgtgtaacctgcacaatgtggaaagctgatatacctgtgcaaaatctttgcctctgtgctgtcagtgtgatgtgctttctgcatggttatatactactagtgattttatcaaaacttctaaaatttaaattacgtggtaaaagatctgtaaaaggctgcataaatgttagttggcacataaagacaattgtagaagttgaaaaatgattgctatatttcaatgtttattcccactcaacatactgccttctaagcttccctttttttgttcaaagcatgatcttaaagatatgtttaagttaatggatgtaatgcagggttcctacactgtattttggcgcatgttggtggccctctgtgccctagatatatgcacacagggtgcaagttaaaagctacagagtgaaagttggtttggatcctcttcatttcatttgtttagcttttctgttatttttctctacttacatgtattcctgtgaataaatccttgttaagttaaccctttacttttccttccatgtgtattttcttatatactgtgaatgtgaaaacctaactggtacacttgatcttgtgttcatatgaaagtgcaagtctttattaatttggattgcctgaacagtgtatcccatgatgatgaaggaaaatggagagatttttctttttaactctgctggtcagagatgaagccacgcctttccatttttcaatgctgcatatttaatctgcaacaaaaatgttaagccataacagcctttttatattttagtttgtcacctttgcattgcagaataaatactgaataaccatttttataagcagttgctcctctttgcatggttctattctctaaaagtgttgaatgatacagccattgcactgaagtttgagctgtgtgcgtgtgaatttatactgtttcaaaaatttcaaatgcatggtagcatgtagaaaggtttttgttactatgtgtgtgtgtgtgttttgttttgttttgttctgttttttaacgttctttcacctttcctctactttggctttgcaaatttcagtctgtagagcctgaaattaaattattttatagtgcctgatatttttaatattataagttggattcaaagggtatacagcattttgttttctagtaccattgcttcactgggagctcaaaatttgcctccctgttagtctttaataactgagtagagtagcttttttattcttagattatagtgatattctgtagtgcttcaaatacttagaattctaatatgagagatagtttaatattctggaatagagagtattttaaattgaaatgaccaaattcgatttaaaacaaacacataacaatcttcagtaaagttatttgaacctgtggttgacaattctgtattgactaaaggcaatattgtcacctgtctcattaaaaattagtttccagttaggcagatgaataacactattaaaaatgcacccagttttgtagtcacttgactttttttttttatttaaatgaaatttaatttgaaaatagaaaataaaattaggtaaatatgactggcaacctgaatttgagttgggattctttgtgtatttttcccccttgaggttattgtttcttcctaatttatatttcagatacatagtgtagaacaggaatttgcagaagccatttaagttatcttttgaggtaagctctgatttagcatttattctgataaaatctaatacatcatgggatatatataaagcaacttaattcttgtggtgtagtcttaatagttttgaatgttgactgaatgtctataaaattgtgagtttgtctttgttacattccagtgtttctgcctcttggcatgcttaaagcacggcttacttcatctgctccttacacactaaaatgctgttagtgtgctcaactacagaaatagccgctgctaagtgatgtagattttctacttgaatatttttatgttgtaggaacctcaggaggtcagtgtttactgttttatatatgccttctttttcctgtttgagcttctctctttgaaggattctaacagaacaaagctgctgatcaacctaagttggaaacagaaagtgtaattaatataacttaaatgcatgtttggcagttccatgttacagtccattagcgagtgaacttagtgccacaggtattcatttattcaggaaagaattttgctttttgtattgtctaatctcttcaatgacttcatactgtgtaaaaaaaaatcactttttaatattttttggttggttatttcccaaataatcaacatgtaaataatcttttaagagccagttctgatgctttacattattgctacttgattttgttatgcaagttagatttcagaagaatagattttaaaacacttaaccaagccattacatcttaaaaacaaaacaagtagcatacattttgtaattaacattgataaacactgtgatttttttggttaagactttttcattgatctgaattgcttaaattgcatatattgtaaaataggatcagatgtatattttaaactaatttcaatggattttcctcttgaaatgctttgtctactcagttataaaatattcagatacaagttttatctcaggtgaatactcttgtattgtttttgctttggtgacatgcttataaagggtcatcctagttacattctttgttttttaagtgtatttcattgagaatctttccatttagtctgatttttttcctaatattctagcaggctggggtggtataaagccctcctgacaagccttttgcctacaggtttacctgaaaatgagctacatatggtcgtcattttcttcaaactctcaaaataggaaagtggaaatttttctcccctatataaaattattctgcctagcagaaatgccagaaataaattaattgcatcttagtctaaatttaagtcctttgccatgaggaaaaagtggttttttgcttcatatggtaaatctatattattcatattgaatgtattaacagataatggtgcaaaagcattcttcccaggggaagagtgtatcatgcataactgcaatttaagtccttcctttgataatacttcaaaacatacacagctttgcttactgaattatttttgcaaataatacaaggaggggaaactaacttgctactagtgttgttaatgaagtataggccttggaacatttaagaaaactggtcttcagatagttaagggcttgggataatttaagtgaaaagtgagatcagtaatgagctgtgttgttaacaatattatctggtaataataccatgcaatatagcgttgtataccaacttagtgcattttatactgtattaaatatggagatacttctaatgcctctctaaaattaaattttacataaaagttattttattcacctttaggctttccaatgaattgtgactaattttttcaatcttacatagatctttcacccattagcattacttacgtagatattctttatgcctagttattatacatattaatttttaaggtatacatttaaattacacaattgttcattgtggtttgtatcccagaatgtgttgtgttttttaaaagatgcataatagctgaatgtatgcatgactttgaaagaagttaaaatggtgattttttttcacctcttgtacattttaaaaccaggccaaatctatttgccaagcagtgtatcactaataagaaaagcagtttttccttttattgcagtttttgtttatctgccatagaatttccttatactgtggcttggtattattcaagattagctatttcgctggtattacatctttttaaaagcctattataacatggttagcctataaggcagtgttggtccccttctaatattggcctcataaaggggttccactgtactttccgcatattactgtgttgttgttttcctttgtggatatataagcaaattgagcttgggtgatttttatggagacaataattagacaatactgtataattagttttacttaatagattatcatcttgtgagaagagatgtttaaacgtggtaaatcacttcatattacaaaacagttttacacttaatatgttaacattgggtgcaataatttagtagcattagctttagttacaaatataactggatctttctgctgacaacttaggttgtatgagttatgcttaaaagctttaaatctgatgtttcctgtacctgccacactatgttagaatgtgtccttcaaacatatcctcctgcaacttctcaaactgtactaaattgatatttcttgaagtctaactctgtgctaacagatctccattttaaatagaatacggttttaatttttgataagctgctgaattttaaagagagttttttggggccaccaaatattttggatcatgcagagaatatatattgtactgtagtaattttgtatttacatttgtatgatgtgacataatagatgtgaatgttaatcactgcttgactatgttaataaagttgtttaactatagat

SEQ ID NO: 12936 - DNA, 14889 bp, Homo sapiens
taatttccaaggaatggaaatcactttcacctgtattagtttgagatgcttgagaaatataatcacatttactgatattttctcatgaaaaaaactatagattttattattaaattctgaaattttggctggcttttgaatgaaggttctctaaatttgtccatttaactgctcatcttattaacagaatgataccttgacactcgattgagcgagaaaagcaatttcatcatggtttttggtgttctctcaatctttagatttttttaattccttttgtttttctttttccaagagtatgccatatatgttgctgccccttattttagggggtggtaataaacagcactggtgaaatcttatgtttattatcatacacaaattctgttggtttctgtttctgagttatttgttgttttttctttattttttctccttccccctcatttgctcatgtcttggttggcgtttggtggtgtataaccgtgattgcgttaccttagcaataacaattggtcgtcttggttacgtttgtcctcaagaggtggcccccatgctacagcagtttataagaccctggtgtgtattattcaatctttttttttaattcatttttcttcactctttctttctctatctcacttttagatatattttcagttggttacaaaaatcacaatcctttatcattgccaaccatgtgactaatcttgtcctatcaggtttgtgaggtttttcaatagcatcgtcatgtatatttattttatgttgtggctaacgactaattgatgcatgggataagattgtcacatgcttgctgtgttaaaaaagcttgattatacataaaaagcatttaaatatccaccagaaaaataaagatgcatgcaaattctataaatttaggtttttgcattacgtttcttttttagaattaatttggaaacttggattgcattaagaaatacatgtttaaatttgttatgtataaaaatattatttgcttgttaatgtaaaagttaaacatctacaccataagctatatagtaatagtttatattgtggcactatatcctatgttttgcttctttcaattgataatctttcaattcaaatcattttagtagtgtttaatggaatacaagtcatgagtacaattttaaaagttaatttggtaatttgttcttcttggctcaggctcattaatagtttaaatgggagattcaaattagttatctactttataaatgcaatttattaagaaaatgtggatttcactgtttctactgtattgagataagatgggcccaacaaacaggaagtatgagtaaacgaaactaaagctttccgaaaaactcttttaatataatcattatctatactgtggtgcttattccattaaatactgtccattagtattgtcattgaatctgcttgttacttaaatgctaaactcaattctgtaattcaataggtgcacctctctgagaaacataagagacaatgaggaaaaggattcagcattccgtggaatttgtaccatgatcagtgtgaatcccagtggcgtaatccaagtaagatgttcacaaagatttgtttttaatgtctaattaataaaattttaaaggaagaaacattctaatactttaattataaaaagttaactattttcaaaggtatcaaaatacagttaaacctttaaaatgtatatttcttaatatcttgaaattgtaatgccttttttttttcctaaattttttttgtcatgaaatgagatagtaacagcagattgggacaacaaggttatattcttgtcttgaatcaggccatggcttctttcatccaaatttcagacctcatttatttactttgtccctgcctcccatccctggatatcagtttgtggatatctacagttaatagagtgaccaaatagtaggaatactgtctctctattctgaataaaatactttgaatcagatttagaaataatgaataaaatacaaatcagccattgaaattgctctaattttgagagcttatgatttattcatctttgttttccaagttcaagttatatgtagacattttaattattcggcagtagtattgaacatgagtccagttaagcatctggatccaactgccaattttctagacacacaaaacaaaaacatgttgaattacaccatgtatattcagtgaacaaaatgctaactgtgggactctaggttaaatacctggattcttcagcagacacgtttaaggaaaagaaagcgtggaaggaatcctgtagacaagagacccaagatacatcaaatcaattgaaaaacgtagttgaggccgaggcaggcagatcacgaggtcaggagttcgagaccagcctggtcaacatggtgaaaccccatctctacttcagataaaaaattagccaggcttggtggcaggtgcctgtaatcccagctctcgggaggttgaggcaggagaattgcttgaacccgggaggcagaggttgcaatgagccgagatcgcgctatggcactccagtctgggggacaagagcgagacttcatctggaaaaaaaaaaaatgtagttgagggagggaagcaaagaactaaattttggtttccaggaatgcacacaagagttataaaactgccccaaaaaaatgcttttatagcaataactttctcacatttcttaattttcaagaaaattgaaactttccactccgagaggggtgttttgaacatttttaaattgtgaccttttgatgtttcctagctcgtattgtggtttttcttaactcggttttagaaacgttaattctgttttataaaattcaaattgatacaggtgatagacgttgaaaacctacaagttagaattagaaaataacttctgactgatttcacactcataaaatattcataacttactgttagaacaagccagtgccatcttgagaggtttctagttacaaaataagcttttgacattttctgggtttttgtttttttttttaatacttaagaactttgtgtgatctcaaatgtgtgctagaggtatctgatatgacatgtaccatctttttcaaaagtatcttccgaccaagattttattgtttctttgtttttgaattaatgttttaagatgataaaagtagcacatgtatgatcataaaattgttaccaacttaagagttggtagaaatttctgttttataacttttattcacataccttattttggatatggttaaaataaaatgtcataggtttatttacatttaaattttttaatcacaaattctgggtatctgtgcatttaaatttttaacatcagatttggtatttggaagacataatttgaataaattgtgttaagcaaatcttttttgcttaaataaacatacacacactgtagtattaccaaattttttgaaattagtgaagttttctgaatataatagtaaaatttatagttgacatgtcagaaaatcagcaatatgttgaatgctgtttgttgaactgttagtgtttcagtatgataggcaagattgagaatattttaatgaaatgcttaaagcatattattatcttgttcttatagtcagaatagcctgattatcttttaagtaattgtccaaaagttgggttttttgttcttgtttggattgggtatttgtaattacataattagtttttcttcaattttttggttgtttcaactaagttatgtctgaaaatggaccttgaaattactaatttctctatttcaaatcaaggtcatttaatatatatttagctagctttaatttctttctaggccagtcaaaactgtaagatcattggttttatgtttttctttaatccggtaaatgaaagagtatttttatgggtgtcgatttggtgctttcagttcatttctgatgctgaacatttattgcacagggggttattttgttgtgtgatgcaggacattaaagtccagtataaactgaatgagttgaggttccttgactgtgggctaatagggacagccattaaggtaatctcttctaattccttatgatcatagttaatttttaaatgtttccttttttaagctagattctattgtgacataaactctgaggtttacatatatcttttgctgagtttgacaaatacaatatcaacctaagatgtatttcttgcttgttacaggattttatatttttttgtgatgccgttgcatcatggattaacccaaaagatgatctcagagacatgttctgtaaggtaactaataagtctttataatgcatcatcttgagactgttaatatcctagtggaaaactttaaattatgtttacattttttgtgaaagttaggctcttcaagtcagtattgatagtttacatatataacctttattcttggtaacaaagttggcttgatcttttcttaaaatacagcagtgactcttatctgtagaggatgcactttgaaagtattttcccaagtgtaccactagtttaggtggtcccattattccatttaaggaaaatagtatatgtttttcaagatggaaatggagacttggagtataatctgaaaaagagtaaatctaaatggctgccacaggagtaagcccatgtcattatttgctttgttaataccctcttttgattaactcgtcagtactcaaccacagtaaaaaataaaatgcagttacacatttgaatcacccaagattaaagttagtgaactatagtttgtcgtgaactcaaagcttgtgtatttgcagtttgaaaaaatacgacataaaaattgtattgcttggatgacttctctactttatcttttcgttagtatggtatcagagattgcttagagtatatctgttactggaacacttgccaaagtctaaacttctcaaagcagagtttaagcatatgctatgaggtacttttaggcaaggcacgtgtattagtccatattcacgctgctgataaagatatgcccaagggccgggctcagtggctcacacttgtaatcccagcactttgggaggccgaggcaggtggatcacctgaggtcaggagttcaagaccagcctggccaacatggtgaaacgccatctctactaaaaatacaaaaaattagctaggggtggtggcggatgcctgtaatcccagctactcaggaggctgaggcaggagaatcgcttgaacccaggaagtggaggttgcagtgagccaagatcatgccgttgcactccagcatgagcaataagagtgaaactctgtccccgccacacacacaaaaagatatgcccaagactgggtaatttacaaaagaaagaggtttaattcgactcacagttccatgtggttggggaggcctcactgtcatggtggaaggtgaaagacaagtcttaaatcgcagcaggcaagaaagagaatgagaatcaagtgaaacgggtttccccttatcaaaccgtcagatctcatgagacttattcactaccaccagaagagtataggaaaaactacccctatgattcagttatctcccactgggtccctcccacaacacgtgggaattatgggagtacaattcaagatgagatttgggtggggacacagagccagaccatattagcagggaatggtgtagaatcctacgaagtttgagaattgctactttaaaatggataaaatttataaaaaaatcagctgtgttggatttcagaagctatgctgatctgaatttttctcttgttattgataaattaatggtttttcactcttacagatccttcatggatttaaaaatcaagttggcgatgaaaattggaggcgtttctctgaccagtttcctcttcccttaaaagagcgtcttgcagctttttatggtgtttaatctaatacacttaagctgcagtcccaaaattaggggtaagttataagaagtttggaaattttcaggatgaagaaaattttgttagggctgtcatttcaaactactaaatagaataaaaagctatttgttttctatagaggttgaataaaacatagcctcatatcattctatcttgggctttaaatttaaaattacttaagtgggccaggtgtggtggctcatgtctgtaatcccagcacttggggaggccaaggtgggcaggtcatttgaggtcaggagtttgaaaccagcctggccaacatggtgaaaacccatctctactaaaaatacaaaaattagccacgtgtggtgggacgtgcttttgtagtccctgctactcaggaggctgaggtgggaatattgtttgaacctgggagatgggggttgcagtgagccaagatcttgccagtgcactccagcctaggggacagagcaagactccatctcaaataaatagaaaataaaattactcaagtgaaggctaaagaaattttcttaatagaaccaacaagcccagaaaaacgattagctccagtttgaatcgtaggtataaagaaatccacgttggtacactggttggatttctcaacattgcttcaactattccttttttctttcttttttcctgcaagaagacatcggcactcatagtgatggggtaaaattgatttcattttggagcatgaatttatagtctctgctgtaacaaggacttttcatttcacgtgctttgaaagaaaactcagttgggttttggcccactgtttttgtttttcactgtatgtttcactgagtacctaccatgtgcccatcacttttttttttcttttttttttttttttttttttttttttttttttttttgagacagagactctttcgcccaggctggagtgcagtggcgcaatctgagttcactgtaatctccgcctcttgggttcaagcaattctcctgcccgagcctcccaagtagctggcattacaggcacatgccaccatgcctggctaatttttgtatttttagtagagatggggtttcaccatgttggccgggctggtctcgaactcctgaccttgtgatgcacccacctcggcctcccaaagtgctgggatttacaggcgtaagccactgagcccagtgcctaggactatattttaaaataagcaatgaaagattctgttttaatttgggatggactatattcatttggactcttgctccttgagctcttctgtacttaaatgggactagcagttctcatctctgagcttcggttttgtcattgagttatgttgaggattaaatactatactgtatgtgatgccagaacttagtatgttgcctggcacactaagttgactcagtaaaggttaggaactgggccagtacaataaatatcagggttttgacattcatctttagattttcaacatgaattaagacatatctgactggaagccagaagatgtgctgaatgagcatgtacagaagatgtacaccaagttgaattacactttagattgaattggaggagtttttttggcttgcttgcttgcttgtttactccaagctaaaatttaaatctggaaagatttcaccatccaagctgtctaacctagaaggtagtagaaatggactcaaagcttccagaatgtgtcagagcccttcatatgtgttgtcctacttcagtcttgagtcctcaagagctgttttccaaaatggctttggcattttggaaaagtgctggattcaccttatgttaaattatgagaatgcaaaagatgagaatgacttgtagcttcaaagcttcaatgagctactaacaagtcttgagcactttcagatttattacctctgtggtctcatcaccaatcatgaattaactgttctaagacaaggtatgaaatagttctcggttttgtaattagagctaaaagtagatcagtatcttttattcctgcctttttgtactcctcttccttttcttcagaggcaggagaaaagggattgcttatatttctacacagatggattaactgccctctgtgaattcacatgaacgttcataaatggccaaaacttggcatgattgggtagtagagttctgtttgtaaaaggaccactatcaggtaacagtttaaatctcccagtaatcttaccttatttcttaatatcctttttatcattaaaactgtttagcatagaaaaaagttcctaccagaaaaaccaagtgactggaagatagtggaaatgaccaagtgaaataggatcagaatgggaactaattaggaacatcaagaaggcaagtgtaggcagggtgtgatggcccacatctataatcctagcattttgggaggctgaggtgggagcattgcttgagcccaggagtttgagacctgcctgggcaacatgatgagatctccatctctatgaaaaaaattaaaaagaaaaaaatgagctgggcatggtggtatgtacctatggtcccagctactcaggagactgggcaggaggattgcttgagcccaggaggttggggcttcagtgagccatattcacaccactgcgttccagcctgggtgacagagcaaggtgctatctccaaaataaataaataaatgttaaatttgcttttttctctctctctttttttatgtagaatttgtttgttgatacttactgaatgtagtgaccctgctgtggtaatgaacacttctagtgccttctaggcttaaaataccagacaaccccaaataacaaatgctcttttgtgttttgataggttggatttctgtttgcttaatattgggaatactgggggaaaaaaagatggtgttttcattctaaggattgtcctaaagaaagtgctactttatttttaagaaagtaaggccacttgttatataagaaataacaagttcccattgggtcccattttgcaaaaggggataaagaattagactgatagcatcatacgaggcatatttcactatacaaagtgttgtacacctgtctatacaactctcctacccagcttgacctcacttttcatacctgatgcagcaaacaattcagtgccataggagaaggaagcagcatggttataagtgactaacacgatattaggcaatttgtccaaatttctcattttctttataggtaaagatagcattcttatttgattaattttttgttccactggctttgaaagacaaacgattgttaaagataaaattgtttttgttctttttcttataggtccttcagtcttggagactataagggagcctctgcacccagggaaaatgttaccctttacaggggggaagggtaaaccagtagggaatacagtacaatcccaaccctactgggaggggcgggagggaggtgttgccgtcactgtattaagtcgatgttgggaaacgttttaacatctggagcctttgtgggtggaaatatgtctccagttacaactccgcagtggatgtgaagaagcaaaaaaaaaaaaatctattcagtctactcacaaaacagtacattgtggaatattatggggaattgtaccaaaacaagaaccatataaatgatgcctagggacaagaaagaggaacaattctatagcgcacaataaaggaaacctaagaatgggagttacaaatagtaaagaagctttttttttttttttaatttaaagtttttttatgtaagttttcccacatgatggggccttgttttgcatgttgatgaagaactacacaaagaaaactaatatagttaaaagtcagcttgccttcccgtagtagaagcaggttcttggaagttacaatttaaggtaccccaaaaaagttggaaataaaacaaaacaaacataaacaatgaagcaccctgtgaaatgccaaatgagtcactccttttaccttttttggggtgggcagggagggaggaataaatggggttgggcatatcaaactaaagatgacatcttaattttgcattgaacattaatgtagcggatataatttgatgattatacttcattagatttaatttctaggccaagatgttactttttaaagtgcagtttaaggttcaggcatgcattctggctcatagtggttgaaagtaatttaaattagtgggaaagtagcatgcttgcatcacatagagtgagattggtattcatttacctatgttgcgccagtttgtgttgcagtttaccaattcaatatagccctgcatttaaagttcctttttaagatttgtggattttatttttattaagaacatagatatataaagtactgtagtttacaggtaggccttgaaatatcttttttaggatctgttaggaataagattgatattgtattgtgtgtaacctgcacaatgtggaaagctgatatacctgtgcaaaatctttgcctctgtgctgtcagtgtgatgtgctttctgcatggttatatactactagtgattttatcaaaacttctaaaatttaaattacgtggtaaaagatctgtaaaaggctgcataaatgttagttggcacataaagacaattgtagaagttgaaaaatgattgctatatttcaatgtttattcccactcaacatactgccttctaagcttccctttttttgttcaaagcatgatcttaaagatatgtttaagttaatggatgtaatgcagggttcctacactgtattttggcgcatgttggtggccctctgtgccctagatatatgcacacagggtgcaagttaaaagctacagagtgaaagttggtttggatcctcttcatttcatttgtttagcttttctgttatttttctctacttacatgtattcctgtgaataaatccttgttaagttaaccctttacttttccttccatgtgtattttcttatatactgtgaatgtgaaaacctaactggtacacttgatcttgtgttcatatgaaagtgcaagtctttattaatttggattgcctgaacagtgtatcccatgatgatgaaggaaaatggagagatttttctttttaactctgctggtcagagatgaagccacgcctttccatttttcaatgctgcatatttaatctgcaacaaaaatgttaagccataacagcctttttatattttagtttgtcacctttgcattgcagaataaatactgaataaccatttttataagcagttgctcctctttgcatggttctattctctaaaagtgttgaatgatacagccattgcactgaagtttgagctgtgtgcgtgtgaatttatactgtttcaaaaatttcaaatgcatggtagcatgtagaaaggtttttgttactatgtgtgtgtgtgtgttttgttttgttttgttctgttttttaacgttctttcacctttcctctactttggctttgcaaatttcagtctgtagagcctgaaattaaattattttatagtgcctgatatttttaatattataagttggattcaaagggtatacagcattttgttttctagtaccattgcttcactgggagctcaaaatttgcctccctgttagtctttaataactgagtagagtagcttttttattcttagattatagtgatattctgtagtgcttcaaatacttagaattctaatatgagagatagtttaatattctggaatagagagtattttaaattgaaatgaccaaattcgatttaaaacaaacacataacaatcttcagtaaagttatttgaacctgtggttgacaattctgtattgactaaaggcaatattgtcacctgtctcattaaaaattagtttccagttaggcagatgaataacactattaaaaatgcacccagttttgtagtcacttgactttttttttttatttaaatgaaatttaatttgaaaatagaaaataaaattaggtaaatatgactggcaacctgaatttgagttgggattctttgtgtatttttcccccttgaggttattgtttcttcctaatttatatttcagatacatagtgtagaacaggaatttgcagaagccatttaagttatcttttgaggtaagctctgatttagcatttattctgataaaatctaatacatcatgggatatatataaagcaacttaattcttgtggtgtagtcttaatagttttgaatgttgactgaatgtctataaaattgtgagtttgtctttgttacattccagtgtttctgcctcttggcatgcttaaagcacggcttacttcatctgctccttacacactaaaatgctgttagtgtgctcaactacagaaatagccgctgctaagtgatgtagattttctacttgaatatttttatgttgtaggaacctcaggaggtcagtgtttactgttttatatatgccttctttttcctgtttgagcttctctctttgaaggattctaacagaacaaagctgctgatcaacctaagttggaaacagaaagtgtaattaatataacttaaatgcatgtttggcagttccatgttacagtccattagcgagtgaacttagtgccacaggtattcatttattcaggaaagaattttgctttttgtattgtctaatctcttcaatgacttcatactgtgtaaaaaaaaatcactttttaatattttttggttggttatttcccaaataatcaacatgtaaataatcttttaagagccagttctgatgctttacattattgctacttgattttgttatgcaagttagatttcagaagaatagattttaaaacacttaaccaagccattacatcttaaaaacaaaacaagtagcatacattttgtaattaacattgataaacactgtgatttttttggttaagactttttcattgatctgaattgcttaaattgcatatattgtaaaataggatcagatgtatattttaaactaatttcaatggattttcctcttgaaatgctttgtctactcagttataaaatattcagatacaagttttatctcaggtgaatactcttgtattgtttttgctttggtgacatgcttataaagggtcatcctagttacattctttgttttttaagtgtatttcattgagaatctttccatttagtctgatttttttcctaatattctagcaggctggggtggtataaagccctcctgacaagccttttgcctacaggtttacctgaaaatgagctacatatggtcgtcattttcttcaaactctcaaaataggaaagtggaaatttttctcccctatataaaattattctgcctagcagaaatgccagaaataaattaattgcatcttagtctaaatttaagtcctttgccatgaggaaaaagtggttttttgcttcatatggtaaatctatattattcatattgaatgtattaacagataatggtgcaaaagcattcttcccaggggaagagtgtatcatgcataactgcaatttaagtccttcctttgataatacttcaaaacatacacagctttgcttactgaattatttttgcaaataatacaaggaggggaaactaacttgctactagtgttgttaatgaagtataggccttggaacatttaagaaaactggtcttcagatagttaagggcttgggataatttaagtgaaaagtgagatcagtaatgagctgtgttgttaacaatattatctggtaataataccatgcaatatagcgttgtataccaacttagtgcattttatactgtattaaatatggagatacttctaatgcctctctaaaattaaattttacataaaagttagttttattcacctttaggctttccaagtgaattgtgactaattttttcaatcttacatagatctttcacccattagcattacttacgtagataattctttatgcctagttattatacatattaatttttaaggtatacatttaaattacacaattgttcattgtggtttgtatcccagaatgtgttgtgttttttaaaagatgcataatagctgaatgtatgcatgactttgaaagaagttaaaatggtgattttttttcacctcttgtacattttaaaaccaggccaaatctatttgccaagcagtgtatcactaataagaaaagcagtttttccttttattgcagtttttgtttatctgccatagaatttccttatactgtggcttggtattattcaagattagctatttcgctggtattacatctttttaaaagcctattataacatggttagcctataaggcagtgttggtccccttctaatattggcctcataaaggggttccactgtactttccgcatattactgtgttgttgttttcctttgtggatatataagcaaattgagcttgggtgatttttatggagacaataattagacaatactgtataattagttttacttaatagattatcatcttgtgagaagagatgtttaaacgtggtaaatcacttcatattacaaaacagttttacacttaatatgttaacattgggtgcaataatttagtagcattagctttagttacaaatataactggatctttctgctgacaacttaggttgtatgagttatgcttaaaagctttaaatctgatgtttcctgtacctgccacactatgttagaatgtgtccttcaaacatatcctcctgcaacttctcaaactgtactaaattgatatttcttgaagtctaactctgtgctaacagatctccattttaaatagaatacggttttaatttttgataagctgctgaattttaaagagagttttttggggccaccaaatattttggatcatgcagagaatatatattgtactgtagtaattttgtatttacatttgtatgatgtgacataatagatgtgaatgttaatcactgcttgactatgttaataaagttgtttaactatagat

SEQ ID NO: 12937 - DNA, 607 bp, Homo sapiens
gtcttgagcactttcagatttattacctctgtggtctcatcaccaatcatgaattaactgttctaagacaaggtatgaaatagttctcggttttgtaattagagctaaaagtagatcagtatcttttattcctgcctttttgtactcctcttccttttcttcagaggcaggagaaaagggattgcttatatttctacacagatggattaactgccctctgtgaattcacatgaacgttcataaatggccaaaacttggcatgattgggtagtagagttctgtttgtaaaaggaccactatcaggtaacagtttaaatctcccagtaatcttaccttatttcttaatatcctttttatcattaaaactgtttagcatagaaaaaagttcctaccagaaaaaccaagtgactggaagatagtggaaatgaccaagtgaaataggatcagaatgggaactaattaggaacatcaagaaggcaagtgtaggcagggtgtgatggcccacatctataatcctagcatttcgggaggctgaggtgggagcattgcttgagcccaggagtttgagacctgcctgggcaacatgatgagacctccatctctatga

SEQ ID NO: 12938 - DNA, 607 bp, Homo sapiens
gtcttgagcactttcagatttattacctctgtggtctcatcaccaatcatgaattaactgttctaagacaaggtatgaaatagttctcggttttgtaattagagctaaaagtagatcagtatcttttattcctgcctttttgtactcctcttccttttcttcagaggcaggagaaaagggattgcttatatttctacccagatggattaactgccctctgtgaattcacatgaacgttcataaatggccaaaacttggcatgattgggtagtagagttctgtttgtaaaaggaccactatcaggtaacagtttaaatctcccagtaatcttaccttatttcttaatatcctttttatcattaaaactgtttagcatagaaaaaagttcctaccagaaaaaccaagtgactggaagatagtggaaatgaccaagtgaaataggatcagaatgggaactaattaggaacatcaagaaggcaagtgtaggcagggtgtgatggcccacatctataatcctagcattttgggaggctgaggtgggagcattgcttgagcccaggagtttgagacctgcctgggcaacatgatgagatctccatctctatga

SEQ ID NO: 12939 - DNA, 315 bp, Homo sapiens
attttgtgctatacctttaatagcagaaacagaatatttattttttcctgtggtccacatatcatatgtcattgcagtggactgtaaatttcctttattagaattttatttcaaacatggcttaaagttagtggactgttacctgagttatcagaggtttgacaacatgagatttgacattgtagcatagcaatattctaatccattcattcagtgagtaccatgagacttaaaatctgacagttgattttgatgtaaggtaacaaatttccactggttggtttggcaaatgttaatcaaagaaaaaatttttga

SEQ ID NO: 12940 - DNA, 1432 bp, Homo sapiens
ctataccaagtttctcatttgtgagatggaggtattatttacttcgaaatggtaaagggaaaacaagcaaaagcatttgcaaatgctctgtaagtaaacctatatcatgaatgtattttcttggccagaagtactggtacagaccgttaagtatggagggataccagggcagtcaagacctgcactgggtacatagaaacattttggcttggttagacagtctctgtttcctgtaccacaggttttcctgacagcctgtgcaagttaggacttttgatcttaatatttgtacagcttgtgagttaggtgaattatttccaccaaacaaaacattttacgaatataagcatccagatggcctatctcaactcccatggcccccaccagacactatatcaatatgtttcttatcagttttgaaattttctccttaagtttcatttagcatattgctgaaagtgggttaaagaggcccaattagtgagatcccagctgggacttttagatgggaaatatgcaggattgccagatgagatcatgggcctgatctagtgtttatctgttaaatctgtttataactgcttaactcttgacttgcagacttttaaggcagccatttgacgtcacagggttgggaacgaggcttgtgccagtataaagccgctgtgatgtggggccattgggcccttctgtttttctcaactatgtgcatgcactttggagcttgacaaacagccgtgtccagtgaactccccccaaagaaaattgaagttgactcaccgtgaaaggcataccaccaaaagtgactcctaacccatgtacaattcagaaagaaagcactagttaacaagtgcccagtgtgtgattatttagttctagaatctgtccagattttctttgttctggctctgttctcttcatggtggccctgcagtttttagatgttataaaacctccctacgattataatagcatgtaagttaaaagttgttgtgaaaaaacaaatgaagatgcatttataagtagtcttcagtctttgcctgaagaagagtaagttggttatttgaatttatgaagcatttacataggaaactagaaaataaaacactaataaaagcgccttgccaggagcagtggctcacgactgtaagcccagcactttgggaggctgaggtgggcagatcacctgaggtcaggagttcaagaccagcctggtccaacatggtgaaaccctgtctctcctgaaaatacaaaatttagccaggcatggtggtagcctgtaattcccttaggagactgaggcacgagaatcacttgaacctaggaggcggaggttgcagtgagccaagatcgcaccactgcattccagcctggatgacagagcgagactccatctcaaataaataaataaataaataacataaacaaaaaa

SEQ ID NO: 12941 - DNA, 9925 bp, Homo sapiens
gatagaataaccaatttaaaatgtcttatagataaaatctagaatgaagctttggtaagaagtctgagctacgtacataagattatcagcaacatatatgttaaggtggagccatttaaagaaagaacagaagggacctatgatttactgattgttgaaaatcaaaataaaggaggcagagaaaataaagattgtgagtcagcaggacttttgtcttattttcaagtggatttattgattacttttcttcttacagccaagtgcaagatctgtgaatgggcgtttgaaagtgagccactatttctccagcatatgaaggatactcataagcctggagagatgccttatgtttgccaggtattgcctttttctccagggagttttagcagttttgccctcaggaagaatacaaagaatttactaatgaatattgttgaccacctactgcatacactcagtttaggaactctgagtaggtacagaagaaatagtaaacacagtttatcttcagggtttccatgcaggagaaaaacataaaagaacatgtccacaagtagactagccgggaacatgtgcatattctaagggagtgtctgtctcctgaacgtgccctttggaaattgacagaaaaggctttatttttcttagttagagaacatggattattcttagactttctgtcccttcctatttttaaagtaatagctaaacctatcacaaacatagcccagcattacaaagtcaggaaaataatttgatttctatgcatttgagaaaactttttttttttaatttaaaaatttttgttgctacctttttttttaaggcctctcagttgttcacttcattcttagccttattttccctcctatgtgactcaggtgtgtcaatatcgctcctcactctactctgaggtagatgtccattttcggatgatccatgaggatacccggcatctgctctgcccttattgcctgaaggtcttcaaaaatggcaatgcattccaacagcattacatgaggcaccaggtactaggcaccaagcaattcccatattctcttgttttttttttttttaaacatggatgctggggccagggctgagctaggcaaataatttgggcagagattataatatgcatatgtttgcagaaatttattgaattcacttaatgtgccatgtactagtctagatgctagagatttagtagtaaacaaggcaaacaatacaataaaacatgaagagtactgtgttggggaaattataggatatagaaaatcacatagctattctgggtgcctagtaaggcttccagaaagaagtgttgttcaatacctgagggatgaataagaatgagccagatgaaataagacgaagaacagtgtgcccaaggcacaaagcaaaattgtggaggttcaagaaattgagagagattcagtgtagggtgtaagagacagaggggttggaagttaggcagggacagatcatggaggatcttttaagccatgaaaagaattcactgggaagccactaaaggggttttaagccctggagtgatgtgttcagctttagttaaggctttatactgcctgcactgcagagaatggattaaaggagattgagactacagttagggaaactagctagaaggcctttttcagtagtttaggtgagagatgatagtggctattggcttttgaaataaaaagagggtagagttgagagatattcagaagatttgtgatatttatgatgtagagatggattaggtgaaggtagcaatgcagtagttaagaatagtgcctaaaattctgtcttgggcagttgggtgaatgagggaactatttgctgaaatagaaacaatagagaaagtatatttgtgaggggggagatcatgagcttggatattgtaagttagcagtatctgtggatgtcaagtgtagctgttggataatagatctcaagcctgtgagagaactctgggttgtagaaaagatttaggaatcagcgttatataaatcctatagattttaaacttaaataccatgggccccccaaccctgttgagaataagagaaggcttaggatatttgaagtcccttatctataaagcaaccaccatagtactaggaggaaaaccagaagagtcttaaccttaaggaaactggggagaagaaagtgttttaaagaaaagggtgtgatcaaaatgtcatatgttacaggaaggtgtcaagcaacatagagacttagaaacaggcctttaatttagcaacattgatgagagccattttgttggttggtagggtggaagtcacatttcagcagaacaaatgaatgagaggtaaggaaatgaagacgatgtatttaaagaagtttatttataaaaagggaggacccagggtaggtaaatccagaggaagaagtggcaaagaagagttttttattgcttttattttccttataagatgaaaagctatgacttcgttttaaaatactacaagaagagagccactagaggagagtgaaaggtatatagtatataagagaggattcaaaatggagaataagatgagtgcatgtgtgcttaatagtcacatacatatgcacacaaacatatgtaccctattacactcatagtctcctttgcacagtagtgactgctgattgtctaccacaactgtatttccaaataggggcatggaaattgtctcttagcctaagcttacagagctttgttatcctactaaagaaaatcatagacatgggttctatttttgaaggacttcaatactaggcagactgaatcctcaaagtggtctcaccaggagacatatctgtatatactgatgtgttaagtgagaaaacagcaaggtatagacaagtgctatcatttgtgttaaaaggagaaaaagaagagggctgaggtgggaggatcacttgagcccaggaggtggagtccagcctgggcaacatggtgagacaacatctctacaaaaaggaaagggaaaaaagtaagggccaggcacagtgatgcacgcctgtaatcccaacactttgggaggccaaggcaggtagatcacttgaacccaggagttgaagaccagcctgggcaacatggtgacaccccgtctctacaaaaaaatacaaaaagtagccgggcgtggtggcacgtgcctgtagtcccagctacttgggacgtgcagtgagctatgaacatgccactgcactccagcctgggctacagagagagaccctgtctcaaaaaaagggggcgaggcaggtaatgattggatatgaatgtatttgtgatacagttatatgtgtagactgcccacgaaagcatactcaggaaactggtaataagttgtttgtatggaaggggactgagtgttggagttgaaagcaaagttggaagagtatagaaaaaaaagtatgactttagtttactatgtacattgtccttttttaaaaaaagaagaatgaagaatgtccagaagaatgtccagttgtcagcagtgtaaagatataatacaaataaaggttacatcactcattcaaattgttaaaacaagtcaggaaaggatgatttgagaacttagtcatcctggactagaatccatctttctttgatatcatgggaggtgatgattctcaatggtaggttttgtggtcatgttgcatatttctttcttactctcttaaattatcaacagaaaggtgggaagaatgatatggttgacattgatctgctttctcctcaaaaaagaaaatttattaggaacctttaagggattttgtctctttttttccctcccccacttcagaagagaaatgtttatcactgcaacaaatgccggctgcagtttctctttgccaaggacaaaattgaacacaagcttcaacaccataaaaccttccgtaaacccaagcagctggagggcttgaaaccaggcaccaaggtaaagagtttgccagtgtcttttataggcccagggagggaggaatagagattttcagtattctgaaatttagtgtgggtgatgtctcattgttacttcccttggttctcaggtgacaatccgggcttcccgagggcagccacgaactgttcctgtatcctctaatgatacacctcccagcgccttgcaggaggcagcaccgctgacctcctcaatggaccctctgcctgtcttcctttatccccctgtccagcgcagcatccagaagagagctgttaggaaaatgtcagcgccttcttctaagtgctgggcgggtggggactgggtggccaggattattcctgatacacagtgcaatctggtagctttttagcagggtttgttgtctgaaaatcctacattttggggacccatgaggcagtaatgagaattctttttttttctcccccacaggagtgtcatgggccggcagacatgcctggagtgcagcttcgagatcccagacttccctaatcatttccctacttacgtacactgctctctgtgtcgctatagcacctgctgttctcgagcttatgccaaccacatgatcaagtaagttggtttttaaccagtgttttagcttgagagttcagattctttttttcttcttcttcttcttttttttttttttttttgaagacagggtctcactctgtcccctaggctggagtgcaatagcatgatcttggctcactgcaacctctgcctcctgggttcaagtgattctcctgtctcagcctcccaagtagctgggattataggtgtgcaccaccatgcctggctgatttttttgtatttttagtagagacggggtttcaccttgttggccaggctggtctcaaactcctgagctcaggtgatccacctgcctcggcctccctaaagtgctgggattacagacatgagccactgcgcccggccccagccagattcttgagcactcatttcattttctcccctgcttctaatatgtttcctccttcaactcttagagctatttgttcttctctcctagcagagtgagaggctctgttttttcggttttgatggtctgtgctctaatttcatagggccttgctattcaagtaccagtagtattaggtgggagcttgttagaaatgctgactctcagccccgccctaggcctactgaaccagaatgtgaattttaatagatcctcagtgacttgtatgcatattaaagtttaagaagcatggtgacaggaaaactggcttaggttgagattagggtgcactgaagaagtgtctcttttgttgggggcattgtcactggctggtgatctctagcttagccagcagaactccgtaactcataccacttctttgtctttctcagcaatcatgttccacggaagagccccaagtatttggctttgtttaaaaattctgtgaggtaagaaaaaacttattggcagcatcttaatttttcaggtttttacattaattttcaggtttttcattatttggagaggtggttatgtgaattaatttcagaaaaaggagaaagtgggagggcattccttttctttcttaagcctcaaagcttaatggtctcaagtgtcactgctgtgtttgtcttacatagtctcaattctcttttttagtggaatcaagctggcctgcacttcatgtacctttgttacctctgtgggcgatgctatggccaagcatttggtattcaacccctctcacagatccagcagcatcctgccacggggtaagtaggagagaaggggattagttgagcaaggggaggaaaaaagatacaggttcgtactgtatgcatcaggagcatacctacttggcctcactcattcactgttgagatgtgctggacctaattagaaaccttccgacctgaagtttatataaaactgggaaagctggtcactgcgaacagcgtatttgtatgtagtaagttgaatcccagggcactgtctttggagggcttattttttcactgagctaactatttttgttgtttcattttccataggactcacttggatagctcactcaaggtaacaaaaactcacctcacaatttaatttctggtttgcagtgtgtttactctgttattattattattattatcatattattgtttcaatttcctagttgaactgagatttctcctcttctctttgctcctcacccctttaggcatggccagactcgtgaccgagtgcatgaccggaacgtgaagaatatgtaccctcctccttccttccccactaacaaagctgccactgtgaaatctgcgggggccaccccagctgagcctgaagagctactaactcccttagccccagcactcccatcaccagcctcaactgcaaccccaccaccaacccccactcacccgcaggctttagcccttccaccgctggctacagagggagccgaatgtctgaatgttgatgatcaggatgaagggagcccagtcacccaagaacctgagctagcatcaggtggtggtggtagtggtggagttggcaaaaaggagcagctgtctgtgaagaagcttcgagtagtactgtttgctctatgctgcaatacagaacaggcagctgaacacttccgaaatccccagcgacgtattcgccgttggcttcgacgtttccaggcctcccagggggagaatctagagggcaaatatctgagctttgaggcagaagagaaactggctgagtgggtgctaacccagcgcgaacaacagctacctgtaaatgaggagaccttgttccagaaggccaccaaaataggacgttctttggaaggggggtttaagatctcctatgagtgggctgtgcgtttcatgctgcggcaccacctgactccccatgcccggcgagctgtggcccacaccctacctaaggatgtagcagagaatgcaggactcttcattgattttgtacaacggcagattcacaaccaggacttacccttgtctatgattgtggctattgatgagatctctttgttcctggatacagaggtgctgagcagtgatgatcgaaaggagaatgccctgcagacagtgggcacaggggaaccttggtgtgatgtagtcctagccattctggcagatggcactgtccttcccaccctggttttctacagagggcagatggatcagcctgctaacatgccagactccatattgctagaggcaaaggagagtggctacagtgatgacgagatcatggagctgtggtcaactcgagtgtggcagaagcacacagcttgccagcgcagcaaaggcatgcttgtgatggactgtcatcgcactcacttgtcagaagaggtactggctatgcttagtgcctctagcactttgcctgcagtggtcccagcaggctgtagctccaaaattcagccattagatgtatgcatcaaaagaactgtcaagaacttcctgcataaaaaatggaaggaacaggctcgggaaatggcagatactgcatgtgattctgatgtcctgcttcagctggtgcttgtctggctgggtgaagtgctaggtgtcattggggactgtccagagctagttcagcgctccttcctggtggctagtgttctgcctggccccgatggcaacattaactcacctacaagaaatgctgacatgcaggaggagctaattgcctccctagaggagcaactgaagctgagtggggaacattctgagtcttccactccacgacccagatcatctcctgaagagacaattgagcctgaaagtcttcaccagctctttgagggtgaaagtgagaccgagtctttctatggctttgaagaagctgacctagatctgatggagatttgagtgttggggtcattagggggtgtgcagtgggggtggaaacatgtgagggagggtaaaggggcttagggaaaagggggcataccaggtggggtatttggtttctattttttaattttataccaccactcccccctgaagttgacttacacttccctgtggatttgtggattaattaggaaaaccaatagtaatcacgtctgagccaaggagctggcccattggtcattcacttctgctaaaaacaggtttttgtgactttttttttttttaaatttaaatcactgtgtttggtatttttctgacaaaattaagaaaaagaaaaaaaattatttgtgggcaaatgttaaatttttttgtttccccttttacctcaattgtatcatagtactgggtttttttgtttgttttattgtgtggccaatgtctttgggcatgatgctatctaatcattgttaatgtgagaacatttctgaagatgggaaagacaaattatgtagctcacaaactggtttattatatatatggataaaaaacttttttcattgtggtcttaacacttttatataaaaatgaaaatggaaaaaaagtcccactgaactctctcttccttctccttttctttccttccctctccagagatgttggtttctacagcaaccctagatataaaattgtggctttaaaaatgcatgaaaccacctttaattatccagaatgaatagatttgtcttttcctcaccaccttccctccaaaacatgacataaacaatattttttgcacttgtgatccttggcccctttccccattctcaacaccatccatccctctggacaaaggatcatacaggtgttattagcaagcaagagatactgaagcgatcaaacagttttagggtggaagccattcccagtttgagtcttcatcctgtaagcccccaggggcagtccctgctttactgaacttcatcctgttagatggagagcatgcctgtttaagggattactggtcctacagccaggagctaattgttcaagaagtgttgaactttaaaaagacaagaccacttgttgaaatccagcgtgctctgtggctttcccctatttctcttaatacttagggaagaatctgacaggaagaagcgcacaggggtgtgcacaaagaaaatgacatgaatctttatttttcactgccagcttcaaggaaagaaaattttttctacaatttgcatgagggatttttttaattgtatgtactcatggttgtaaaccaaaacgtactgtaccgtacagagaaaaggagcaaaaaaccaagtcttctgtttatcctgaggctttccacaatgttcccctcctgtgagccaaggaggcaaactgcacaagcttgtaaatggttcgtctttaaaatgtacataagtggaacatttaataaaatgaggggaaatggatttataaacttgttttttttctaggtgaccctgtttaataggctttcacagactggggaatgctcaagatgtgatgggcctggtggtacaggtgtgacatttgttaccacccatttctcccaccccaccctgcttttttgtttgtttgttttttcatcccccagcacactataatatagtgaactggaaaagtcccttccagaaacagcttggccagctttgtgaacctttgacatctgaaaacaaccaaggatccatctgggcttctcttccccagctttttgcctgatgccattttattgacagacaatggactttgaagtcagcctttgcctttgagaaagttcaagaactatggttggtcacgtctatctacaacctaatcctactctttggtagtctctgcagcagccacagccttagcagagctggggttcctgtcttctgcacacgattgactttcttgatgggtaattttttttaagattataccaacagtggatcagctgggttttggccaggaagttgtctttgtggactctgcctgcatggcttagtagtagaaggaaatttttttttggttttgttttttataattcagtttaatcaataaacatgtatttattgactgtt

SEQ ID NO: 12942 - DNA, 2386 bp, Homo sapiens
tcagcaagcattttgaagaatttatttactttacaaaagaagagtctatctttgaactagccaagttcaaagttaaaagtagggcaacttcagttctggataatgcatctgtatttcattcaaagccactaaaaaaggaagacagaataataaaattgtgaagcataaagggatcaattcctaaaaatagctgtactgtccaaccaaaactttccacccagaaaattttcctgggtgagcctcccagaaaagcccagcttagtgtaagccaaagacctcccaagtctgtcaccaattttttccctattactcacctgatcatgtgggcaatatcccagttggtctctgtagacaatggtccctctatttcaacacctttttcggtgacagtggcggtttgaaactggaagaaagcagagcattcaataatgcccacgccttaagtccttaaatgaaaggtcaggtggaggtcttccccaatgtgaaaataggagtcacacaagtaaggcaatctgttcttcaaagcatagagacccagggattgcaagtagccagagcccgccaattaggttcccagcacatccctcacccggttgtaagaacgggcatctcggtagtacagcactcgcatgcagcgttctactaagtcgcgggcctcggtctggcttagcactggctgcttctccagaacttctcgcagcagaggctagggagattgggggaaaaccatggggggatattgggctgaataacaggctagttgtctcaaatctatggtataaaaagcattagagtgaaagatgacattctacttcttgcctcaccagaatgaactctgcttagaaaataagctaagagccacttcaggaagaagttctagggtgtcctctctttgcatgtctactgactcccagtcatgtcatcttgtcactggaatcagtgtcaacacctacagcccccagactacaaagaaaaccatctgcccagtaatagcgatcccagcccatccctcatatcagaatttcaggagaaaagcagacaaccactaatccatttccttttgtcttccctttcccccacctctagacttactacttacctgagccaagtatgcaccataaccagtggccagcgaaggggcttcataggctacaccaagcatgtccacataaccgaggaagctaacaggacacaatgggtcaaaactcatttcaccttaggttcatcttagctgaagaaggggaccatggggtctgagttaaagtgggattcacttggggagaagagacagaagagatactacacaggtactaggttgggtggtaaaggaaataagttatttgtattcatatgaacctctctccatcagcatagcctccgatgaccatggtgttccacaaagggttcatcttcgagcgccggctgtacatggccctggtcagccatgaatgaatagctctaggactatagctgtgtccatctcccagaagctcctcatcaatccttaaaaggaattggttgtgagaaaagggagagaattaagtcggggtctccacccatccccaaaagaagttaccacaccttcccccattttacacctaatgccaaaaactttattgcaaacacagatcgcccacctccaacaactctcccagtcccccgctgcaacaagtccccccatcccatcgaagggaataaaaaacaggggactcccctctctacttgggaaccactctcctgttctctggatgacttacaccatctggccgagaacttgcttcaaatactggaaatcagcgtagtcgccagaggcacccagcatggtactgttgttgactcgcataatgcgagagatgttgcggaaacgagccaaggagccgtaggatcccagcatgtctgcggcaatcaccactccgccctcgaacttaacgccgaggactgaggtcccggtcaccatggggttcctaaagagtgagaacggtgggagctgagaggggggatggactgcgccctctttccgcgcactgagctgcgcttctgattttctataattccttccaattattctgcattctccaggactccgcgccctgagctcccctgccgttcgcgcgcccccggggtccccgcctcaccttcccgggctctcaaaaccagccggcagcaccaggccccacggtccctcccgctacgcaaacgaaagcgccgagaacttactgggtccgcgtgattggacctctgtaaagtgcagacgccggatccatgaaggaatcgggagtggacggaatgcggtaaaactgtcctggggccggaccccccgcccaaagtccggaccgcgaccccaaaaacgcttccatcttagtcacggtagcagaaaaaatgaaag

SEQ ID NO: 12943 - DNA, 334 bp, Homo sapiens
tggctcatacctgtaattctggtactttgggaggctgagatgggaggattgcttgagcttgggaggtcagggttgcagtgagccatgattgagccactgcgctctagcgtgcgagacagaacgagactctgtctcaaaacaaaaatccagggttctcggtagttaaaaaaagaaaaaagaattatttcaactttattcatatttctttggctggggtgtagggggctgggggcggggggaggttagacattgtccagtaaatgcccaaggctttaagcttccagttttcatatttgcaaaaacttgaaactaattccattaaagtgacaaaaat

SEQ ID NO: 12944 - DNA, 1035 bp, Homo sapiens
gccagaaccttcctcttttttcttaaaaactcttcttaattgaatccaaagtatcttttaaatgttctacttgtgtaatcatgtcatctgtgaatattcagatttatcttctccttccaatccgtgtacatttaatctctttttctgtgccttatttcgggggctgggacccttcagtccagtgttgaagagaggcagccagtggaggtcttgtctcattcaaggactcagagcaaatgtgttccacatttaatttcactatgaaatataatatttgatgttcagttttgtagatgctatttatcagatcaaggaaagcccagtctatacctaatttgttaagggttttgctttttatcataagtgtcgacttttatcaaattcttttttgtatctattaagatgatagatgattgattttcatatgttaaattaaccatgggttaaacaaacttacctttatcatgatatattattctttttgtatttcacaggaattagtttggtaatatgttgggtcaatgtttaaaaaagaaaatgatgtgtaatttttttcttttattgtagtatttctgtttaatttttggtatgaggattattcaggtctcataagagttaggagtatattctcttttaaaaaatatttgctaatttacactcccaccaacagtgtaaaagtgttcttatttctccacatcctctccagcatctgttgtttcctgactttttaataatcgccattctaactggcatgagatgatatctcattgtggttttgatttgcatttctctaatgaccagtgatgatgaactttttttcatatgtttgttggctgcataaatgtcttcttttgagaagtgtctgttcatatccttcacccactttttgatggggttgtttgcttttaccttgtaaatttgtttaagttccttgtagattctggacattagccctttgtcagatggatagattgcaaaaattttctcccatcccgtaggttgcctgttcactctgatgacctatcaatgatagac

SEQ ID NO: 12945 - DNA, 9357 bp, Homo sapiens
agcattcccttcgtgccgctaccaagatggcggcgcccatcttgcggtccttttcctggggccggtggtctggtaccctaaatctctcagtattgttgcccttggggctgcgtaaggcccactcgggcgctcaggggttactggcagcgcagaaggctcgaggtctgttcaaggacttcttcccggagacggggacgaaaatagagctcccagagctcttcgaccgtggcacggcgagttttccccaaaccatttactgtggcttcgaccccacggcagactcgcttcatgtgggtcatctacttgcgctgctgggcctgtttcatttgcagcgagcgggccacaacgtgatcgcgctggtgggaggcgccacggcgcgcctgggagacccgagcggccgtaccaaggaacgcgaggcgctggagacagagcgcgtgcgagccaacgcgcgagctctgcgcctagggcttgaggccctggcggctaatcaccagcagcttttcactgatgggcgctcctggggcagcttcactgtgctggacaactcggcctggtaccagaagcagcacctggtggacttcctggcggcagtggggggtcacttccgcatggggacgctgctgagccggcagagcgtgcagctgcggctcaagagccccgagggcatgagcttggccgagttcttttaccaggtgctccaggcctatgacttctattacctcttccagcgttatggatgcagggtccagctgggcggatctgatcaactaggcaacatcatgtccggatatgagttcatcaacaagtaagtgcctttaaaccttggggaaatcctgggaccaaataatttacacactagtagcctgtgattcactcttaggattgtagttgctgcccttcgttccagctcttgttggttttatccccattaaggctctataatggcgttaataacactggctaataagaattaaagggctgaattaagggtattaagagtaaacggtgtattctaaaaattagctgggcgtggtgatgcacgcctgtaatcccagctattcgggaggctgaggcaggagaatctcttgaacccgggaggcgaaggtttcagtgagccgagatcgcgccactgcactccagcctggggcaacagagggagactccgtctcaaaaaaaaaaaaaaaaaaaagggaaacagaccactagtgaagatttggtcggtctgttttgcttcgcctaagtcgtcctctctaattagagaaactgcttttgtgtgtttataccagaacgtgactgggcctccttgagtagctagcctctgctttagctctgcaccctccatgaaactagtgttagtccttggttggtatctcaaaaagttttttcaactccaaataattgacaagtaatgcgggtctaatagcattttcttgagagaggtgaaggatagggctagctcatgtgcaacagagcaaagcacatgtttaaaaggcgtttagaagatttcctttagtgtctcttcctgacaccccttcacccagttttctccttcccactcagcctttcaaaatctctagtccattgttatgtagcacttccccttggcctgcctagaacctgcctggaaccactcatgaggttcagaatgaatagagtaagtactgtaacaatacataagaggaacaagaattcagatttaggaggtcaaggaagttttcctggagcaagtaaccagaaagaaatctggaaggtgaacagtagaacctaccaccacttgtgcttgaggcacataatgaaattgttctttatgcgtaggttgactggagaagatgtatttggaatcaccgttcctctaattacaagtacaactggagcaaagctgggaaagtctgctggcaacgctgtttggctaaacagagataagacatctccatttgaattgtatcaattctttgtcaggcaaccggacgattcagtggaaaggtgagttctgaataatgggctgagaaaaactgacaccataaactcatgatgtaattttagccattgaatctatgtacattttatagtttttttgtttttaacgtagtttctgtctgtacataaaccattacatcatagaagactaatttttactgtgttctaaagttaaacactttgttggttaaagcagaaaaacagtgggtggctagaaaatgtagagccaactttttgatctgtatctagcaagttcttaggattttatcacctgcatattctagttttttcactcctttcaacttaaccttgactacccttatttttcctttgtctctcttctctcacaaatatgactttaaagatcctcttaagaaatgatttctccttaaatcaaattgccttaaactcttggaagaatatgaattaatgagaaacaaatatacctgcaacaaaaagtgaaaaaaatattttgatgctctgtaacatcaaagtaatctaggaataattctttaagacttaaaaggtatatgactttcctgcaaaatattaaaagatgctattgagcaaaataaagacctacataaatggagagttagaccatattcatagtacaaaaataatatcagttcttttttgtattttttgaaacagaatctcactcccattgcccaggctagagtgtagtgacgcagtcttggctcactgtagcctgaaattcccaggctcaggtgcacaccaccatgcccagctaattttgtattttttttttagtaatggtggagtttcaccttgttccccaggctggtctcagactcctggactcaagcgataaacctgcctcagactcccaaagtgctgggattacagcatgagcccccgcacccggccaagataccagttctggatttgatctacatttagtacagtgccaaccatatctaaaccggctttttgtggaacttgacaagctcattgtaacactgacatagaaataaaaagggctaagattggccaagatgtttttgaagaacagagtggaagattatcatgccttattacaaaattttggtaattgtgtttttttctctttagatttagtcctagaatgtttgacgatatagtcctggggttttgatgtattgagaattgataatctttttttttttttttttttttttttgaggcagtgtctcactttgttgcccaggctagagtgtagtggcatgatcttggctcattgcaacctccgcctcctgggttcaagtgattctcctgagtagctaggactacaggcatgcgccaccatgcccagctaatttttgtatttttgtagaggcagggtttcgccatgttggccaggctggtctcgaactcctgacctcaagtgatccaccttcctcagcctcccaaagtgctgggattacaggcttgagctaccgcacccggcctagagaatttagataatcttttcaaaaattgcattttctatctggttctggtgtatagaaatacaattactttatatatattacctttaaatctagcaactctgccaaactcactatttgattacagacgtgagccactgcgcccggcccaatactgtatttcttgaccatggtgatggttacatagatgttttatgattcattaagctatatctttgtgaataatgtacttttttctgtgtgttatatatatttcaccaaagaaaaagagaatacatataggatgatattatagtcatatatcacttaacaatagggatacattctgggaagtgtgttgttaggtgatttcatcattgcaaatatcgtagagtgtccctgcacaaacatagatagcatagcctactacacacttaggctatacagtgtaccctgttgctcccagggtagaagcacatacagcacattactgtactaaatactgaaggcagtgataacgcgagggtaagtatttgtatacgtaaacatagaaaaagtacagtaaactatggtattataatgttatgaaccactgttggactgtaccagtccgtggcctgttaggaacagggctgcgcaacaggagctgagtggcaggcgagcgagcattacacctgggctccatctcctgtcagatccacggttgcattagattctcataggagcacaaaccctattgtgaactgcgcatgcaagagatctaggttgcgcattccttttgaggatccaacaaatgcctgatgatctgaagtggaacagtttcattctgaaaccacctcccctccccgccgcctcgtggtgccaaaaaggttggggaccgcggatatatgtagtccatcattgacagaaacatcattatgcagagcatgatgatttatatcagtttttaaaattacacagtactttttttttatggccacatgcacatgaaagtataaaaacatgcttgggaaagatggcagcacataaacttagatttatgattatctcggggcaaggaagggaatgtgattggactgcggccttcatctatgcctattttgttccttttaaaaagaaaatacgaggctgggcttggtggctcctgcccataatcccaacactttgggaggctgagacaagaggatcacttgagcccaggagtttgagaccagcctgggcaacacaggagaccccgtctttacaaaaaaaatataaaaattagccaggcgtggtggcacaagcctgtggtcccggctgcttgggaggcagaggtggtagaattgcttgagcccaggaggttgaggttacagtgagccatgatcatgccactgcactccagcctgggcaacagcaagacccccatctcaaaaaaaaaaaaaagaaattgaaaacaaagatgccaaaatagtaacaccttaaatctgggtgatgtgtgcatgggacctactatgttcagtacatttctgtatgtttgtttcatatttaaaagtaagcaggataaccttaaagggtagaagagctggagataaaaattaggtatgttatataagtgtaactctttattttttgtctcaaaggtacctgaagctgttcactttcctgccccttccagagattgatcatatcatgcagctgcatgtcaaagagccagaaaggcggggtcctcagaaacgactggcagcagaagtaacaaagcttgttcatggacgagaaggattggattctgctaaaaggtagtagtttagtatgattaacacttgatagttagttattcagtggatagacatgagaaaagtaggagtatgttttaggattatcttgtcatttatcacaaggactgtcagtatttgacttagcaatttaaaatagcccctgtttattggaaagaaggattatcttgaattaagtttatgaattataccagatagatgtttaaaaaacttttagtctatgccgggcgcggtggctcacgcctgtaatcccagcactttgggaggccaaggtgggctgatcacgaggtcaggagttcgagaccagcctgaccaacatggtgaaacccccatctctactaaaaatacaaaacttagctgggcgtggtggcacacgtctgtaatcccagctactcaggaggctgaggcaggagaatcgcctgaacccgggaggcagaggttgctgtgagccgagatcatgccattgcaatccagccggggcaacagagcgagactccatctcaaaaaaaaacttttagtctagaacttggacactctataattggttaatgggtattagaacatgtatttgaataaacatttatatgatgtagctcttaaaatgtgtttttcaggtgtacacaagccctttatcacagtagcatagatgcactggaggtcatgtctgatcaggagttaaaagagttgtttaaagaagctccattttctgaattttttctcgatcctggaacaagtgtcctagatacttgccgcaaagcaaatgccattccagatggtccccgagggtaagattatttaacttttagatttacagttaattcaccattaaatgttacagttcacaaggccaggagaagtggctcatgcctgtaatcacagcacattgggaggccgaggcgggcagatcacgaggtcaggagatcgagaccatcctggctaacacggtgaaaccctgtctctactaaaaatacaaattagccgggcatggtggcaggcgcctgtagtcccagctacttgggaggctgaggcaggagaatggcatcaacccgggaggcagagcttgcagtgagcggagatcccaccactgcactccagcctgggtgacagagcaagactctgtctcaaaaaataaataaaatgttacagttcacagcatgtgtttccagagaggatgttttcctgatagtgctttagtggcatctcttccttagaaaagttagtttagtccaagaataaagtatagcctgagagtacttattgttgaaaatactttatattttctataatagtacagtactcctatactgtctcttattatatctaacccagtcagtctttcctccaacactggaaaagtgcatttgagggacatgttcagtaaatacactggcatcagtgtacggcttagggatatggtcacagttttagagggatgcagaaacagaggccctatgtaacagattaacacagcccctctcatagtctgtatcctttttatattcggggatgggaaaggttacctaacctatctatagtattaactgaatttctgaaaatgaaatgagcatataatggccaaaaccgcaagtacttttgcactaacctactaacgtcataagactattattgtaaactatataataatccccttgagaattgcattttctattcaggaattgagtagaatattttaattaatcagttatgaggtattaaggagtaaataaggtttttcacaaaaaataattcagcatataattgatgcttatccatttttaaatgaacagtgaggtggaaggaaaagtgttgggtagccagaagacccccaggtgcctcttttgcaggagttcacacagaagtcaaatggttatcggccatatcatggccatgattatgaatgacatttgttatagttgttctctttcaactgtcttggattgtttgcctgtgtcctaaagagtcctagactattctgcctggaaaaagcacccattgtctccctttgcatcacctgccactccaccttagtgattccctcatctgctggtttaacacacagtgaatttgaggctggtgtcatatacttccctgtagtatgtcagcgagacaaataattttcctcactatggaagcagatttcgttttcttctgaactttactatagtgtgttcgctaatactggaagctttaccactactaaaaatgacaccacatctgatttagccagggctctaagtaatactgatttttttttttaatattatataagctaaataggtttggtgcatttaaattaaacatagaacatgatctggaaactagcagacagcgtaaaataatacttcctaaaagaaaggaatctggccttaagtagaaaatattttactgatgagttttataaaaccatgtccatggccaggtatggtggctcacatttgtaatcccagcacttcgggaggctgagggcgggaggattgcttggggccaggagttcaagatctgtgtgggcaaggacgtagtgagactccgtctctacccaaaaataaaggtataaaaatatctttaaaaccatgtccagtagtggtttcttaattttatttggtaacattcagatgagagaaaaccaccatttttctttcttaaggacttccaagatctagccacgctgtagccctgtcttctcagatctcacctctttctagctgctcccatgtttcctgccctgattgtcaaggtagcttcactcccagtttaagtatctcttttttcagtgaaatgttcagccctcacctacccagtgtgctcctagaacaacttctcctaggtctttctttttttttcttgagacggagtctttaaaagagcagattgcaaggcgtaaattccggccagacacagtggttcacacctgtaatcccagcactttgggaggccaaggcaggtggatcacttgaggttgggagtttgagaccagcctggctaacatggcgaaacccatctctactaaaaatacaaaattagccaggtgtggtggcatgcacctgtaatcgcagctactctggaggctgaggcaggagaatcacttagaacacaggaggcggaggttgcagtgagctgagatcatgccagcctgggctacagagcaagaatgtgtttcaaaaacaaacaacaaaaaacaaagagcagtaaagagaggcagaatctattaataatagagcaaacatgaaggtaacagtccagtgccaaatgaaatcttctcaattggagagcctctgaaatctaagtgaaacagtcttttttgggggacagatcaacagtgattggatctctctacttactaaacgtttctattttttaggtatcgaatgataacagaaggcggagtcagcataaatcaccaacaagtaacaaatcctgagagtgttttaattgttggacaacatattctcaagaatggactttccttacttaaaataggaaaaagaaatttctacattataaaatggcttcagttgtgatgaaaagtccttctggttgtccaaataaacttacccatcattcattctcaagacctctgaagggttggctccagaacttagacctttgcttatgcaaatcagaaaaacagaatggactaggactcagtgtgagtaacttcattatttttatgggccggttaataaatatttgtttaataatgggatgttttattttctgatgtacaaagcttgattaccatagaaaaccatgattttcagggttaatctctttttaaaattatacttcagaagagaaagaaatgctgctttcctatcttacccttcctgctctcctttttgtagtgatgaggaacaatgaaaaagaggtagtgtaaggaattgtgaggctgggcatggtggctcacacctgtaatcccagcacttcgggaggccaaggtgggcaaatcgcttgaggccaggagtttgagaccagcctggccaacagggcgaaaccccgtctctactgaaaatataaaaattagccagatgtggttgcaggcacctgtaaccccagctactcaagaggctgagctgcgagaatcacttgaacccaggagatggaggttgcagtgagctgagatcacgccactgcactccagcctgggagacagcatgagtagtgagtgaaactctgtctca

SEQ ID NO: 12946 - DNA, 422 bp, Homo sapiens
ttgatgcatgtactttattgcactgagtttttcttgctataccttggacaagactgccacctcctggaagagccgatgaatactggggacgaggtgcaattagggaatcggtactatgaaattgcttgcgtctcagcagcaactccctatctctccgcgaacttaaaccaattcctaacctttctcaacctctgtgaacagctttttgcatggaaccaagacttcaaagaacttgcgcatcacaatctttttacgtgaaaatgtaaatacaagttagcatttgtgaagcgttatgtgccaaatgctttaatttttaaggctcacaacagccttatgaggtaggaactatcataagcagatccacactgctgatggaaaaattaagtttaagggaacgtaaggcgacggctctgaggcggaat

SEQ ID NO: 12947 - DNA, 9357 bp, Homo sapiens; identical to SEQ ID NO: 12945

SEQ ID NO: 12948 - DNA, 422 bp, Homo sapiens; identical to SEQ ID NO: 12946

SEQ ID NO: 12949 - DNA, 25231 bp, Homo sapiens
gaagtatcatgtaaaagaccagaaaaccatattggacaaaaagaagctcatagcattctggttggaacgttatgctaagagggaaaatgggaaacctgtaacagtgatgtttgacctgtcagaaactggaataaatagcattgtaagcattttttcattcattccaaatcagtgtttatcatggcttcctccctttctcctgtccttgctgccaaccacatattgctgtaaaattgaggtaactaacttatattagggatttattttttcaccttgcagtgtgagtgtagtcaaacatggaatagggtttgcagagaattaaatttgtttctgtatttggcgttgaaactgtcgatttcctagaaatgttccttgtctgagacacaggatggagaggtagcatgtcgaggctggcaaggtatgaatcgatgtgataactgtgaactttgatatcaaagctaatatcctatagcacctgccccggtgtgtgccacatagtaatatattcaggaaatatcaagtaaggtaatataccatctcgaatttgttatattcataccatgttttacagttgcaagatgttcacatgagttttgcacatataacactttgtgattttattgagtgtttttgtttgcttgtttggatttgttttctatctgtttgatttggttagctttggaaaccagttttcttcaggtgattttgccaagcttgaaaaataagtaaaacctacctgtctttaatttgggtccttgtgaccttagtgatacctacaaacccttcagcagcaattgagatcacttggcacatttattctaactactgtctcttatatttaatctgtggctaattctgatagcagtaatgtcgtattcacaaacgtgctcagggcagtgttgaaatctttttggaattccatttggcaaattatgttaagaaccttaaagtgtttgtatttatattctttgcctggtaaccaacttctggaaatctattctaaagaaataatcctgagtacagaaaaagcatcatacatcaaaatattttcccagtgtcatttaaagtaatgaaaaattagaaaaaaatataaatgttcaacatgatgaaatggcaaattatggtatatctagttagttgatggagtatacatatagctatgtaaaatggtgtttttaaggaatttatagtaatattggagagaacacttttttctgagatgaaaaaagctgtatgattatacatactataatatgtatgtattctataccatggtgatacatagcccaacaaaggaaactgtagacataacacaaaaccagctagagagaactgctaacaagagctttcttgcagtggtaggaccacaaatttttttcatgtttctatttctctttttatttttcaaggatccgatgccctggagttttccaacctagtttccatgtcagtggttttaaattagagaaagtaaattattttatatccaaaatcaaaatcaatttgcctagataaataaatattccataaaaataaatcctgattcttttgtcctttggatatgatagtttcctaattattaacccagaatcatgaagaataaatgttaatatttttgttgccaagtataaggacagagaattgacttgaactgttttattttttcaagctacttatatctcaccatctttaatttgtaaataaggtgtatttgcactactaagtatttaagtcattattgttttaaaatacttgaatcttactgaataatttattttcataaatgaccctttcatgagtcacaaagaatttaagtgagcttataaacatgtcacaaagaatttaggtgagcttataaatttcaaggcaaaaaataagaaaatcatttgttagagttgggacaccagtttggctctaagctttcagctgcctgcctgaaagaaatgcaatcatttaaaattattcagcggccatccttcacaaccagtgtcttagaagtatatccattcctaatacttgaactagaaagtctttcatgggtcctcaaaaggacgttttacaagataataacagcctcctcgaaaacatccttatagaatgctgagcaatagggttgatggagctatttcttgtagtccccattaatagaatacaccagtgacatcttatcatatccacttgaattagcagtaactcacgattttacgaagaaggatattcaattaaataaatgatagaaacaagaatgttattccaagactatttagacaaagtctctgggggccataaattctagactaggtaaccacatttttatataactggttcttttcagctattttctttgactgttacttaactgccaattatgaaaactccatgcacagtggctataatgattagttacaaaggtattattatatatatatatacacacaaaggtattttatatatatatattatatacatacacacacacacacacacacacacacacacacacacacacaaaggtattattatatatatacccataacaaatacttaagatagttaaggatgcttacttttagtttactgcaattaaagatgctgcaactaacattccagggatgaatttatagacacttatctctaggaaaacccacctttccagtaattgtgatggatttcagtttgcttggttgtatctttcatcccacagtctttataagatggccaatcagaattagtgaatcagtatgtggccatggagtgaaatgactcatggaaataaccttaatgacctaatttcctgttgctgtgctcaaagcagtagaaccaaccagatagctatgtttgtagtctcccagaaatcagaatcagtgaacaacactggaatataaactaaaaaactaattctaggtctctaaataaaatttaaaaagccagaaatggagtagatacagcaggccaatgtgattagattaagtattgtgtttaaaaaaggttgataaaatatattttattgacactattatgtggtgtaaaaattaggattaaaaagcaaatatatgagaatttacatacatgtgtattattatcccaagtagtctgattataaactgtatacttgtttcaataattctttagttattcaacagatttttagaatttctctatggagattgcttttagatccattttatgccctgttgccttagtagcctgaagtgtgtaactagtttgaggtaatgtgaataattttaaaacatcactaagcatctggtttcttcaagtcagttttagggctgattattataaatagcttaatgacctaaaaccttaatccttgagaatatagatatttacatatgagcttactttttaaagaatttaataattgtctcacttgtatttaataatttatcacctttagaaatgtgcaattttaagttctctaatgtggacagtcttaaagatttaatctttattttaggacatggactttgtacgctttatcatcaactgctttaaggtttattaccctaaatacctctgtaagtaacttactcctttataaaaaatataacatattgaaactgtagacaatgtctgagaattgtggagccttatgttattatagactttcatacctgaaactttgttttctgatgaagaattttaaatgtgttcatagacattattgtaacacatacagaggaaagtttttcataagtattcattgtccttcacagttaattttaagagtttaagttctaaactatatatatggcatcctataacacacacacccactcacacacataggtacataaaagcatacatttatttcaaaattatctcatttttactaatatttcaatttagaaattcatttcaaatagtatttattatatgaaacttcttgcatacaagaacagataagcagtattgatagagtacactgtataataagcaatattgatatataaagtacactgttaccaactgctacttaaaaattgtcattaagaaaatacttgactagaaggtactacatttgaatctggcatttggagtttgtttgttttttattgtgactattccattaattacctgaatgaagaactcctaaaccttatatagtccattttttacttgttgaatttgtatgatgggttcaccctagggaagccgagatgccaactcacataaacagtcaagtatatttaaccccaatggtttaaaagtgaaaagacagcagagaggcaacagggatgtcagaaaatgggaatttacagatctgcctgagcgtactcctagaaaacagcaaattgggtcttttgggactcgtgactcaggtgactttagcataaaatccctaaattatcttaatttggcatgttaattttattgttaatgtgaagtgaggaatagacaaaaagcataatggatatcaagagtcagtgccacccctagctgtatactctcatcttttcagagagagtattcatgaatatttttaggtaaaaagaatgatcaatagtgtccagtttggggaacctgtactatcttctgttccttatggatttttcctgtatctggcatgtaccctgattccttaaggcctccagagcagtgccagtcattggtcagtagggaatcactaccccatagttttagtttgttgctcttatggacaaaatgaaaaaatatccacttgatcattgaaatatctaaaggagtttgtgaagagccacttatcagtagtataaatattattattactttgtaaaatacatctgagattcttttgagagaactattaaaaagttaatagatctatataaagatgagttgtaatactattcatcttaactagagattttatatatatatatatacacacacacatatatatatattctacctacataatatagttttgcagacattgaatttcgtggaatcttaattgattatgcttcaaaatctgtcatgaagaataactattatatcttaaaatcttgagtccacattattttaagcatatcccagacgaagactgaggtattaagcaccagggtgcctctttacagatgcctttttccttatatgtactttacttgtcctacattaatgcaacaactctaagaggttctctgctcagagaagagtgaaattacattttgattcctctggaatagaggaatgaattgaatctcaaaaatcttctttgcagtttctggttctttctcacagttgtctcagttgttaatagggctgtttagtatcttcaactcagtgtgtaaataatacttatgcatactttggaattattagcttcctggagctcatgatataaagtagaaataatttttgtttctgaaaacgtagtgatgtattaaaaggggagggggcaactgtgagactggtttaacaatagaatctctagaaaattgtaattgaaaccataaattagacctggaaatgattttaaagttcagtggcttcagcactactttgacatgccacatccaaaaactccatttatccacttaactgttttcttttgtacctccctgcaaacaacaaaagcagtgagtgacaaaagaataggctgtttaccagaggacagtgacagtgcactattgatttcccacaagtcttcctcctgggctggcacctcaccattgtgacatgctagttcagttccagcaccacatggaatactattcatgatactatacacttcactgaattagagctcagacaacaagctcagtttttacttaaatttagatgaccagttttttctaggctggtatgagtgatattattatagaggtactgattcacattcaatgaattttttttcatctttcagcaaaaatagtgatctttgatatgccttggttaatgaatggtgagtatatttatactttcttaaaacaaaatgtctaatttcctttactttgccgatttagccatatttctacaattgtttaaaataatgtttatattgtcctttgcatgctctcttaagagactggagctagaacactcaaaggctattcctaagcaaacagggctaaaattttatacccaggatctgggggcacccattagtcttctttaaaaacagccttgccaggcatggtgttgcacggctatagtcctagctactcaggaggctgaggcaggaggatcacttgaacccatgagtttgaggccagcctgggcaacataatgatacccatctcttaaaaaaaaaaaaaaattaacaacagcctcaaatattcaaccattaaggtaatactctagtcagaagcctcaatttgtcatgcacagataaggtatgtcacagaacacaggccttgtctaggtttctcatgggcttcaggtgttgagaaagaaggtggaatcagtctgaaactcaccccaaatcactgtagtgacatgacccttttgacagtcatgatatattttttggtaaaatttttttgaaaaagccattgattgataaactgtcttgaccaactttaaaattactgtaaattgaatgttattttcagaatgtacattctcatttgtgtttgcaaaagtcagttgttacatagaaagcaatagagaaaatcaacaaatccaaaatttggttctttggaaaatgcaacacaattgacaaacctttagctaataaagaagaaaaggaaagactcaaagtattaaaatctgtaatgaaagaagggacattactattgaccttaaagaaataaaaaggactatagggagatactgtgaatgattatatgcaaagaaattagataacctacatgaagtgaacaaattcttagaaagacacaaactactgaaactaattcaagaagaatcagaatagaaatataaaaaaggaagttgaattagtaatcaaaaaaaacttcccacgaagaaaagcccaggcccagatggcttcactggtaaattatgtgaaatatttaaagaagaatcaacatgaatccttcacaaattcttccaagaaatagaagaagagggaatactttccaacttattttatgaggcaagtataaccataataccaaacatcacaggaaaagaaaactacagactggtattccttatgaaaatagatgcaacagccctcaacgaagtactagcaaattgaatccagcagcatataaaaaggattatacaccatgaccaagtgggctcaacatatgaaaatcaactaatgtaatctaccatattaatataatgaaggggaaaattatgtgatcatctcaagagacacagaaaaagcatttgacaaaatctagtaccttctcatgataaaagtactcaacaaactagcaacgtaaggtgcaaagagttgaaacaactaccaagttagaccacagtagtccacacaagaccacccccatttctgacacaaactgcaagttcaggaggtgctcaaaattgcccttaggtttgataagtctagtgaaggactctgagaactcactgaaaactattatactcacaattatggtttattacagggaaagaatttagattaaggtcaaccacagaaagtaaggtgtagggcagagtccaaggaagtaccaaatgttgagcatattacttcactggcatcaatgtgtggcaatgtgcatggagttagtcaacctgggaagctcacccaagcctcagtgttcagagtttttattggaactccattatgtaagcatgattgattgcccatgtggttgatcttagtcttcagtctcccccaaggtctactgatactgtgtaacccaaacgcctaccctgaatcacactgttggtctttcttctatggccagttcctaccctaagtcatattgtcccattgtcacttaaggcccccagacaaacaaagacaatcctatcaggcatgaagattacctctcagaagctgagggcaaagtgcagatctctctttgggtaaggctaatccttcacagaaaagaacttcctccacctgtttataaagggcatatatgaaaaacctgaatctatgaaaacccacagctaacatcttacttagcagggaaagaatggatgcttcccccctaagatcagtaacaagacaacactgtctctcttaccacttctattaataaaagaagttcaagacaaggacacggaaaattacaaaaccccattttagtaaattcaagccttacataaatgaaaagacatgttgttcatggattggaagacttaatacagtctttcttcagtatccatgggggactggttccagaacccctcccccaccaccaccacagactccaaaatccttggatgctcaagtccctcatataaaatcgtatagtatttgcatgtaactgacacacgtcttcctgtatacctttttttttgtttgttttttgagatgagtctcattctgtcacctaggctggagtacattatcacaatctcagctcactgcatcctctgcctcccaggttcaaacgattctcctgcctcagcctcccaagtagctgggactataggcacctaccaccacacctggctaatttttatatttttagtagacacaaggtttcaccacatttgccaggctggtctagtcttgaacctcaagtgctctgcctgccccgccctcccaaagtgctaggattacaggcataagtcatcatacctggcccctcctatatactttaaatcatctttagattatttataatacctaacacagtgtgagtgctatatagttgttctactctattgtttcttatttatatttttgtcgtattggttttatttattttttaatattttcaattgtggttggtgaatcaaaaatccatggatgtgaaacctgtggatatggagggccgactgtattgttaagaggtcaacacttcccaaattgatctactgattcagtgcagtccctatcaaaagcccagctgccttttttgcagaaatggatatgtttgtcccaaaattcatatgaaaatgcaagaaaccaagagtagtcaaatcttgaaatagaaacacagagttggaggacttaacacttcctgatttcaaaatttactacaaagctacagcaatcaagacattgggcatgtatgggcataaggataaacgtatagatcagtgaaatcgaattgagggtccagatataaaccctaatgtttattatggtcagttgatttttttttacaatggtgccaagactattcagtagagaaataaggctttttaaataaaaggtgctaggacaactgggtatccacattcaaaggaatgaagttggaccccaccttacatcatatataaaaattaattcaaaatgaatcagaaacctaaatgtaagagctaaatctcttagaagaaacacaggattaaatccttgtgcttggattgggcaatggtttcttagatatgacaacaaaagcacaagcaacaaaataaacagataacattggactgcattaaaattgaaaacttgtgccttcaaggacactaccaagtaggtgaaaagacaattctcagaatggaagaaatcatttacaaaccatacattttataagggacttattctagaatatataaagaactcttacaatgcaatgttaaaaagacaagtggctgggcatggtgactcacgcctgtaatcctagcactttgggaggccgaggtgggcagatcacctgaggtcagaagttggagaccaacctggctaacatggtaaaaccccatcttgactaaaaatagaaaattagccaagcatggtggcacacgcctgtaatcccagctacttgggaagctgaggcaggagaatcgcttgaacccaggaggcagaggttgcagtgagccaagattgcgccattgctctccaacctgggcaacaagagtgaaactctgtctcaaaaaaaaacaagtaacccaattaaacgagtgaaatatttgaatagatgtttttctaaagaagataaacaaatgggcaataagcacataaagagatgctgagcatcagtagtcattagagaaatgcaagtcaaaaccaagtgaggtgtgatttcacacctactagggtggctagaataaaaaagacataataacaggtattggcaaggatatggagacattggaagcctcatacactgctggtgagaatgttaagatggtctggccacatcagaaaacagttcggtagctaaacatagaattaccatatgacccaaaattccactccttagtatatgcccaagagaagtgacaacgtatgtctacagaaaaacttgtacacaaatgttcatggcagcattattcataataacaaaaagtggaaacagcctaaatattcatcagttgctgaatggaaaagcaaatattgcatatctataaaatggacaattattcagtcataaaagggaattaagtactgatacatgctacattatgaatgaaacttgaaaatgtgccaagtgaacaaagccagtagaaaaagccatgttgtatggtttcatttatataaaatgtccaaaataagcaaatccatgaagacagaaaatagattagtagttgctaaggacttggagaaggaggcctaaagagagattgctatatgaaggttctttttggtgtgatgaaaatgttctagattagattgtggtggtggtgatggtggttgcacaattctgtgaatatactaacaaccattgacttgtataaaggggggattttatggcatgtaaattatatctcaataaagttatgaaaaatcagatttatcagattaaagtagcatagtttcaaacatgtcaactcacattttaaattgaaattaatgaaaatttaaatgttatgtaaaaaacttatagttagctaaaataaaaagatacttctccgaaccatttaatgtttatcatactgttcttagtttctgtttttttaattgacagttttgcaaatttaatgcagtatttctcttttaatttcttaaaaatgtacttagattgtcacagtgaaaatgaggtttaaaaattaagcataaataagaaatgacatgacagaacaagattgtaattaccaaacagctgtgtttgataacagaacagggcagttcgtgccactgcactccagcctgggtgacagagtgagactctgtctcaaaaaaaatttaaaaaccagtttatttttgagatttcgtaagtttcccacaattatataaactgcaaggcctgggagagaggcagagaagtgtagggttagaaaggaaggctggatccagctcacactcataataagaagggctatttctttctttcttttctgactcgctgtttgagaaggtttttcagatagagagtttatcagaaccataaggtaaatgactctttccatactattgtgcagttatttcctgaatcatattgctgtttgattcagtgtctggaaatctaaatagttgggatcattgatggatttgttcagaggccaaaaccctgataagtttattaatgaacatcagggtaatttaatcttcctgaatcttcatggaacatttgaaacccataagggagagccacaatgtaaacgcctacagaaattagagaatgttaattaagtacatcacgtaaagataaatattaacagattatagcccaaactgatttcagaagacctgggttagcatttatggtaaattaattgagactaggaatgatgagaattttaatgaagtgactggtttttcttcagctgctttcaaaattgtgaaaacctggcttggtccagaagcagtgagcttgttgaagtttacaagcaaaaatgaagtccaggactatgtcagtgtagaatacctgcctccccacatgggtggaactgtaagtatttgaaacttgtttataaaacaatactggataatggcacattaggctgtatactttcctcaagggaaaaagaaaagtagtaccataatatgcaaagaaatatcacagatacccccaaaatagcaagtagtgttacacacatttttaaagttttaaagttaattttttattttttaataggtaatatatttatgtggttctaaactgaagagtattcagaagaataatgagaaataagtcttcagtaaaaatatcacctcctacttctgtttccaaccaccatattccctccccagctgaatttcttgtattaatttgcagggatatgtattacccatataaacaagtatagtatataatttttcctccctctcatctcttctaaagtcagtgtatttatgtgctagtgtgcatcctgcttttctcttcacagtacgtcttattccaaatcaatatgtagcaggctctcatactcatttatggctgcatagtattctactatctagacataagttagtgaatttcctcttgatgtgtctttagtgtgcttccaattgtttgctgttcaacagtctttttagttaaaaagatactattaagcatatactatccagatttttttgagctgatttttactacttataaaaaaactgtacaacttatggacttggtacgctttgggttaacttcataatgtttcacttatttgatttttttgcaatctattttttatactgcctgcctggcaaaattgtattcaatcagaactagcaagaggaatagtttcgatatgtccttctgtttattgtctttgattagaaaagacctgaacaaatatttttaatttgaagtctgcttctttcttattctaaggctttatatttcacattttcacctagaaaaaccaaatatacttcatttcaggtgctatgcttgatttaaaatgtgattttatttatttttaataatttgctcataaaattgttatatcttaaataattataattaatataattcataacattttaaataatgttaattttatgtatagaaacggttattttatttcccctctctgtccttagtgatatgtttcttcagaattacagtcaaaattatagtaggactactattttttaacattaatttttaagtattttttttcaaaaaataatacatatacatgattttttaataaagtaaatacaataccagagattgaaaagtataacagtaccatgaaaactacatctgccttcccaggtccatgcccactgccactccctaaaggcagtcaccatcaagttttctatccctctggagttatctattacagttttttacacaatggtcacataccatatatattgtccatttgtacttttttcacatcttttattttgcaggttacaccatattgattcacagaggtctatctcatttttaaaccaaaatattccactgtatggacgggtataacataattgatttaatcactcttcttttaaagggctgcactgatagttgtattctaattttttgccattactagttttgctgcagtgaatatccttgtaataattcttaatatatgtgtgcagcgagaatgcatacagaataaactcctagaaaaaaatctgtgagtatagtttttaatttagatagctgttgccaaatttcctctaaagagattgtgcccatttaccaataatgtgtgagaattcttgaaccacctccttgccagcatcgcatattctcatttttgtagtcattgccagtctcaggtaaaaaatatttcactgtcattttaatttgcatttctttaattataggtgatgttgaaaactttcttatgattcaaaagacaattttcattctttttcagtgtattctgtatccctcttctgtattgttacagaacttatatagttctttaaaaatacacacacacacacacacacacacacacaaacaacatatacatttaaagcttttatccatctgaaattctttttggtgtagagagcgagctaaagatctaaggtgattctgtatagatggctagccaattgtcccacaccacttattgctctttttctttctggtttgaaatgcttcctttattttaaatttcatgatctaattaagtctgttttcttggccaaagtaatgaattgtaaatctactaagagagttatttctctacccaccatttagtaggctcatgtgaaattattttcttgtaggatcctttcaagtatagctatccaccactagtagatgatgacttccagaccccactgtgtgagaatgggcctattaccagtgaggatgaaacttcaagtaaagaagacatagaaagtgatggcaaagaaacattggaaacaatttctaatgaagaacaaacacctcttcttaaaaaggtaactttataaataaaatgaaactgaatcacaagatgtggtctatccccaattctgacactagccagctgtgtgattttgggtaattcacttaacctgctacccttccacatttttgtgtgtaaaaagaaagaggaaggatgggattagctgaccagaagcaccactttagtgtatttaagtctgattccaggccagggcctgtgtcttatacctgtaatcctagcactttctgaggctgaggtggaaggatcgcttgagcaccggagtttgagaccatcccgagcaacatagggaggccctgtctctacaaaaaataaaaaattagccagatgtgatggtgcacacctgtcatcccagctactctggaggctgagttgggaagatcgcttgagcccaggaggtcgaggctgtactgagccatgattgtgccactgcactctgacctgggtgacagagtgagactttgtctcaaaataaaataaaggctgattccatgcttttgtataaagactagcaaaacacatctagaagtaattgttttatctaaaatttttttatttgtctaaaagtaattaatttaaaactttgatttagttcctttctctaatttttaaaagagcacttagtagttgtcactttttacaagtaatcaggaacttgatagatggataaatacaatgttataatttagaaaaatttaaagactcttaagggaaggaccatattgtattttctagagtaacctatgttatgtataatagtaggcactaaaatagatgttaatggtcatgttaatatatgctaaatagttatcctttttttttgtctttagattaacccaaccgaatctacttccaaagcagaagaaaatgaaaaagttgattcaaaagtgaaagctttcaagaaaccattgagtgtatttaaaggccccttactacacatcaggtaatcgtcaaagattttattagctataattttataacatatcttgatcaccttgagggagccacaaaattaagaaaacttctatttggtttttgaaactgtagaaatataaaaccaagagttatctgaagacttaccttggtttccagacgtagtgcatatgtttagctaccttgctttcttctattatgttgagtgtctttaaagggttctcatcacacatcagataataaaactaaatatttatatattaataaatctgaatggcatgtattttcctcacattactgatactattagacttgcccaagtttgggaatgccagaaatgacactaaagtaaggatttgttgattttactttccagaagccaaagatgaactggaaaaataggtttgtgactaaagccaaacttcaggacatctctatttttctgctaggttatttgattcaaaagattccaggttgtttctttcagcattgtataaagacctttttctcactgatgatgtttttggttggtaaatatattttgccttacgttacattgctacaccaactttatgatctcatgtagcattttctgtccctttacttgaaacctttctgtatagctatgttttatgtatatctcttatgaacaatatagccagacttttaaaaaatctaatctgacattctctaattgatagtattagcttgtttacatatattttgattactgttatatttggatttatctccgccatctatatgtatgaaagacagcaagcaagagagacatagatgcgcatgcattttctgtttttcatggtttttctttcccattttccccctttggagtttatcttttttgtttgtttacttgttcccatttttctccctacttatttggaagttacacattctgttttcactgtaaacctgttacatcataggtccttgcctgtaattgtagaggtatgacaggaaaagcaggctagggagaaagccagacagcttttcacctgcacattgggctctgctcctcccttcctccgcccccggtgaagtcccagagctgctcctacacagacacaaggacctaaccaacctctgtcttcctggagctgctcacagttgttgtgctggttactaagaacaatgagatccataaccttgtggttttctatgacttacttaagattaggctctagaagaaagccagcaaccatgcaaatttaccaccttatccaaaactaggcaaagcccttctgggagagctcattcttaaaaacatgtgttagttagattaaaaaacactcccaaggtacagacattcctgatataaaattaacctatttaaagatgtatctcaaaatcaacggcttgctgaaaattcactttagttaaattattcacctttttatataaaacaaaaacactattcttcccattgttttgagccacctgatacaatttggctaatgtaactaaactacacaaactgcttgaatcttttaaatttttttttaggtcataggcattacaatggaaagtaatagtaaaatttaaatattgaagctcattgattttactatttgattagttcttcctacagctcccatcccaaacttacttttatgtttacttttctccttccctattacttagaaaagctgctatatagtaagaaattattctgttaaatacattcctaatcatctttctttttaagttatgctcttttctgttggtgtatagaaatatgcctcattctaattatttgtaattaggtaaagttgaagcagcaatatcttctttgctttattatctataaccttccaaatagtttaaataagcgcaccttaagatagtgctgattataggattaatcagagccttcataactctctcttctgttcttcctggtttgcttttgatcttggggaaaaccgtaggactttttaaatagtgtgcattgaatcagtaagattaaaatacaaaattgtattaggtaattgttttgtaagtcttttttggtgaaatgtctttatacaaatgagcataagatattaactaaatatttttcttcaagctaaatgattagattgtcatttattctgattattacaaatgtcttatgtttttgtcactccctagcccagcagaagaactgtactttggaagtacagaatccggagagaagaaaaccttaatagtgttgacaaatgtaactaaaaatatagtggcatttaaggtaaatatcttaaagatacaataaattatgtttgagaatttgacatgggaagtgattttagacatattctaattgaaagattgaaaattttgaacttgtacagtgtttttatttatgacaatttttaggcatgttgtactaccttctggttctaaccaagtcgcatagctttatcaaaaaattttccctgaggtctgtatctgaatcttttacgtgcagtaataggttaatgtctaagttaatacaagggtttaatgtttgttgtaaataacaacccaagaaaaattactctttactatgtgaataatttaatttataataacagtgaaacataaaactataaaattgatagtgcattttccccaagtgtggtatattctggagtgtagtttatatcggatattaacctgatactgagcattaagtgtaacaagactaagtccgtcactaccccgtattgtaggttttcctgccttaaatcttctatttaatttagatgtaactaccaggatgttcctgatgtgctttgattatctactgttttttaatttctgaacaccatggtattaataacatgcaatctaatgtgcattctgtttttgtgaatttatgtcattaaattcaggcaattaacaggataaatatttaacagatggattgttttatttaagagggagtctgaatgacaatttgacttatatatgagtatgtttttagataggttgagatgcttttttcctgttagtggggaaaaaataccttctatgcataatcgtcaatgttactttgtaaactctttgttcattgattattcactgctaattttttttttagggagatatacctaatgctaaatgacgagttaatgggtgcagcacaccaacatggcacatgtatacatatgtaacaaacctgcacgttgtgcacatgtaccctaaaacttaaagtataataaaaataaaaaaaataaaaataaaaataaaaataaatttttttaaagtcattcttaagccatttccccccaaaaaagcataaaggttgttatgtgactactgtgtttataaataggtgagaacaacagctccagaaaaatacagagtcaagccaagcaatagcagctgtgacccgggtgcatcagtggatatagttgtgtctccccatgggggtgagttgtcacttagtagccacagcaggtgttgggtgtggtgggggtaaggggacctggaccttggctctgagtcagcagagatgtcaggctagaatctagaaattagcagagtatcacgagtcacctcacctcgctgtagacatcttttttcccacatgtgaaatggggtggtcaaagaggtctctaaagccctttccagcattaaaatgtattgtttctaacaagtaaaattgtttaaactgacaccaattgaaattgaatttcaaaagagaaatttcctcacttttagaactttttcctttttaaagacatttccattttcttctttttccttaatgttgagttccagaataatgctttaaaccacatgcatatccaaccgctttgaaggttcctgtttatatgctgaattacccttttggaatgcaggtttaacagtctctgcccaagaccgttttctgataatggctgcagaaatggaacagtcatctggcacaggcccagcagaattaactcagttttggaaagaagttcccagaaacaaagtgatggaacataggtaagcttttccctcacattcttctcaaatgtagtgggaagaatcagaaagagaaaagtgcctccatggaccaggtggcctccctttcttcttgcatctgctgggtgccctgcaaggctctggggatgcccagatgaaagagacctggtgttgctcaaggaggtcactgatagcagaaactcatttgcaggccagtgcaagagtctggatctgtccagatcacaaacacagattgtctcagcagttctccctgtaggagtgcttaccttacatactagaatgttttttgcagcattgtttgtaatagtgaaaaactggaaagaaagaatctaaatcgtaaccagtaaagcaatagtgagatacatttgagtatatccacactaaagtgtgctgcaaccactcataaaggtacagcaagtctatttgttctgacatggaaagacatctgtgatatattttagaaaacaaatctagtgagaaaaattggttatggacattattctatttaagagggggaaaaacttgcatatatagatatatacatgtatgtgcatgtatatagatatatcaggttgtgacaaatttcttgaaaagatatgtagaaaaggagaatagaaggggctgtattgtagttttgctttttttaaattggaattatggtttattggagtgttcacatttttccccccaggggacatttgtcaatgtctggagacacttttggttgtcacaactgggggatggggtacagtgggcatctaatgggggcagcatagggatgctgctaaaccactagcagtacacaggacagccccatcccccaaaaatgatctggccccaaatgcccatagtgtcgaggtggagaaatcctgctttatagggtagttaaggatggccactccgatgacattagagtaggccctgaaggaaatgagagagcaagccacatagataactggacagagacctttccagacagaacaacaaatgcaaaaggagtgtgcttggcctttgggaggaacaacaaggaagtcactgtctcttgactccagtaagggaggagcatggtgagagatggggacagagatagtaggatatcagatcatccctatggtgaggacttctgagcgagaggaaaaactattagttggcactaagcagagccatgaggtgatccgggcttatttttttaaaggattcttctgggtactgtgtagaaactagacggtgggcagtgataccaagttcacactaaagtggaatttgctgtatgccagcactgttctagatgctttagacatattgattcattcagtcatgaagacagccctgtgagggagaaaggcatttttcctactttatagagaagctgggaaacctgataatggctatggttgaatgaaaccttcagggctgggcgcagtggctcacacctgtaatcccaacactttgcgaggctgaggtgggaggactgcttgagcccaggagtccaagaccacccttggcaacatagggaaactttctttctacaaaaaatcaaaagcttagctgatagatcatgaaaatagattatgaacagtgaaattcctgagaaggctgaaagtgcggggaaccaaagcaggggagattagccttagtccggaggagggagaagcagatggaagtcagcagcctgccttgtttttacgtgtaatatttaaattttcaaattgtattacaggagggcctactttctgtttttatcaagagtttttcttttgttcaaagacactggttatgggaatattttgaaagggtaagaaacgctggtataaaaggtgttgcagattaatttgaagttcttacgaaacagtccctcaaaatgaagggttatttttggttttgttatgttcgagttgctttgttttctttgttttttgctttaccaattactgatggcttgcttttctataactgtgagaggagatcactgttctcctgcagaaagtgggagggaggcttgatggtggggtactgaagctcaaggaaagtacctttctcctatctagaaagggtgatttccttcaaatcataagatatttggatgaattctactgaataccatataaacactttcatttgaattttaccgaatggtatctgcaatatgttgtgttccttatacatgcattaattaacgaagctggaagatacatatacacagagcaactgtcttaggtgaacctggggaagaggaatgaggacttttacctctgttacatagacttctgtgtataactgttttcattttatattttacttttataagaaaattaactttttaagaagttatgttttctttggattttaataggttaagatgccatactgttgaaagcagtaaaccaaacactcttacgttaaaagacaatgctttcaatatgtcagataaaaccagtgaagatatatgtctacaagtaagtatactttcttcctacccaaacaaagttgttaatgctgatcaacattagaaatccctttttttctcacggacataaagaaaaacatttggcatagacacgatagaaatactgtcttctttgtgaagagatgccaaatcagaaatggtaagcaggccaagtgtggtgctgcctgtaatcccggcactttgggaggccgaggcaggaggatcacttgagcccaggagtttgaggccagtctgggcaatatagcgagaccctgtctgtacaaaaaaattaaaaatgagccagttgtggtggcacacatctatagtcccagctgaggcaggaggattgcttgaccctgggaggtcaaggctgcagtgaaccatgatcatgccactgcactccagcctgggcaacagaacaagaccatttctcaataaaaaaagaaaagaaatggtgtaagcagtgagttatttttggagatctactaaccatttgaaagctctggccatttttagcaaagcacaaggtactttggggagtatcaaataattcagtcttgcagaaaaaagtaccaattagtgcatttaaatttgaaagagacagaggggctctctgagtagctgaaggctgcttaagggtttctgtacctctaggaactgactgctctgctcctgtctcaactagaaattcagacctctcaaaatgagaataagcatagacatatctgtccaccaaacaaatctaatgccctgttgcacttccacctccttccaccagccttacagagtagtgggccccatcctttcagtgtttggatttctagtattcctgtttgtcatgcccatgattaatggctgttttattgatataaatctttcatcccctcttccctcttcagctcagtcgtttactagaaagcaataggaagcttgaagaccaagttcagcgttgtatctggttccagcagctgctgctttccttaacaatgctcttgcttgcttttgtcacctctttcttctatttattgtacagttaaagaagtggtgccgggtaggaaccacggttccttcgtccattagttggaaaaagtaacagacctaaaactctaccaagctactaaaaacattgcacatctgtgcttcctaaaaggaaatatgcagcacgtggaggggaacacatacatgtcttgaaaataaactgctagaataaagaaatgctggagaaattgattataagagactatagctatttagtaaagtaagtaaaggcatatccattgtgtaaattaatagtttaaatataatttattttttccttttgatctgaatacttttaaagcttaagttttatcgtgtaaatacattagctaaactgaaaagtataagtaacatgctttgttgcagccaaaaaatgtaatctgcttttttatgacagaattattatagctgagctgacttactagcttttctatactatgtatatagaagaacatgtatattgagaaagaaaacatacttatatagaggaatttatgtaaccatgactttgtaattttgagaattcctcccagtgatggtcagtattcttttggaatgtaaaccgatttaatgccaaaccaccttaacctttgtttctcagtgttccttaacagcctgccttttattaatctcaggcttttttatgaacactctcatttcagtagaatttggaaaactaagcgtggttggaatttctttgaattctgttagtaatgcccaaaagaaaagtctcaagcagtccccctatccagtcatttttatggagtttcatgttgtccactatagctggacactgaaccttttgcctaatttattataaaggcctgaccctctattgtcccatcttcacccccattccagagcagaggagtctctgtggaccatgaattgcactgtctccctcctcatttctaaatgaaaggtattagatataaatttttttgaaaggttagttgtttgagatgctaagcaggataataaatttagattttaaaatgttccctgtaaaagtcagcccatgacaaggaaatttacaaaatactagagtatctagaagggtgaaaacaaaaaaaaataaaaagaaacacagacgcccaggtgtcagctctccgtttaaagaatgaaaaatgtaactcatgatgatctgtgaaaccttcaaactaggaccaattgacttacttgatattctgcctttgatatggtagtacccacccggtattcctaaaatcctaaaaagatacaccttgcagtagcagaggcaatgacatgagtttgttttctcattaatatgaccagtttgggtctatgttggttcacatgtacatctactttatatgaaagaaaaaacagttgtctgcctgtaaaatgttgagtttcgattgagccatgtttggagattttattactattctgaagggtagtgttgttggttttcatcttcaagaagttgattccaaaactgagttatgaagaatgatataacagttccttcaaaattggcctaggaaataaaaccttaaaaggacactggtgtgctactttgtcttaatttgggcttttctgtttcagtttgccacctccagctgtgaaatggactgcagtccaccctaagtactgtgcacagtatctccctgtgtgtgtgcacagtggcttccccttacatggtagatttttggccttaatataatctaatcccaaagtagttgtgtatgttttctgttccttggcaaataaatgaagaaataattagccaagattgaaaatgtattgtcctaacggtgtccctttaatgtttcatatgaaaaattatgttgacccactaaaatatccttgctcaatgtctggtcagttgaatttaataacatatcttgttaatgtttgtgtgtctattaaatgtgactaagcaggattactgaaaattcactataaaatcaaaggcatctaaacgtttgtacttgtcttgattaatcatatatttacacttgatttttttctgtcttcatttgtttttatttaatcataattgcatgatttttttggtactctaatcagtaattttatttttaatcatgtcattacctattcatgaccaaattaccaaggaaccaacatttagatttagatatttgttttcacttaggaatggaaattaatagattttccatgaaagcattagtgaaatatcattaccttgatctgcaagtagcctaaaaatgcgattgctggtaaacctggcctcaaatttcatactaccataactgtttttatatattgccactaattttgactggatttaatagcactttattgtacaactacaaaaaaaaatatattcctagaattgttgccagtgtaatttctctaatgttctggtgcttttcatatattttcagtatttttattactatattggtattttctttgtataaattgattgattaaaagaacatgttttctattttaatatgttttagaaaaataattacatttatgaaataaatatcatcaggaaaaaaa

SEQ ID NO: 12950 - DNA, 2397 bp, Homo sapiens
agcataatgactttctttttgatatttatcacagtcctcctgtcaggcgccagagaggaagaagggatcgtctgtctcgacataattccattagtcaagatgaaaactatcaccatctcccttacgcacagcagcaagcaatagaggagcctcgagccttccaccctccgaatgtatctccccgtctgctacatcctgctgctcatccaccccagcagaatgcagtcatggttgacatacatgatcaggtacaataacagaatgtcttggaaatacagaagctgaaattttgtggcagtttgagattttttttttttggctttttgttgcaaatttcttttagtttttacctaaaatgaagttatttaagttcctcattccttttaagaattgagatttaaattctacacagcttccatagaagaaagttgaacttaaaaaattagtatcggcccagcacggtggctcatgcctgtaatcccagcactttgggaggctgaggcaggcacatcacttgagcttaggcattcgagacaagcctaacacagtgaaaccccgtctctactaaaagtacgaaaattagctggatgtggtggtacatgtttatgatcccagttgatgcagaagaatcacttgaactcaggaggtggaggttgcagtgagtcaagatcgcaccactgcactgggtggcagaacgagacttcgtctcaaaaaattaaaaaaaaggatcaaggttatgaaagcttagaatgaattcatgtatgcttgatttgaaattattgatttaagattagtaggaaatagcagacaactgatggtttgagtacatattcctgtttcctagtttcttctggaataattcaataagcaagacagttgggtacatctttgcttataggttttcataggcctccaaggagatgacaggtacaagcctacaatgtttcatttcccttttctttctgccaagaactgagggaccagctgaggagagaggttgcctatcttcagagcctgaggatgaagaccacaattttatggtggtcttttctgtggagtttctgaggtcaaaaaaaaaaagacatgtgtctaagcatgtccttataaaaattgctggattttaaggataagggggaaatcttgtgagtttataaaccaaaaaaaattaccagagaatgctaatgagaataggatctcaattttcatctactgcactagataataaacaataacacatagtgacaattgagaaaatatcttacctagatactcttcttatgccagacatttttattatgttcatgaaacacttaaaaattgatcatgtaggaaagcttaccttatttgtggccgtaacctgataaaagtatggatataaaatactgaaaaacacaatttttgtaccttctccccatccccttgagcaagaaaagcaaaatggaggaaagtgtttacaaagtcccattttgtaaagcataattaatatgtatatgagtgtatgtatataggactatgtgaacacagagaaaaatacagagaaatacatactaggcttgtagggtaagtgctaaagtgaaggaggggtggtggttagtgatggagccaaagaaagaaaagactgcatttcagaaaaggcaaggtctcatttatgtagtagtgttacgtgttgagtctgtatattggaatatgaaaacattacatatgtaaataaccagaacaacacaagaattagaaatcctgagcagaccggtagccatggcagaaattataaaagcataacaaaatccgtctttaaaattaaaattacacctgaggccaggtgcagtggcccacgtctgtaatcccagcactttgggagtctgaagcaggcggatcacctgaggcccaggagtttgagaccagcctggccaacatggtgaaaccccgtctctactaaaaatacaaaaaattggccgcacgtgatggcaggcacctgtaatcccagctactagggaggctgaagcaggagaagcgcttgaacctgtgaggtggaggttgcagtgagccaagctcgtgccattgcactccagcctgggcaacagagcgagactccatctcaaaaaaataaaaacatctgacttcttgtctaacctttaaagaactggtaattcgaatttaaactattctagatcatagaaaaagatagcttccaaatatattttatgaaactaacacaaccttaacaatgaaacttcatagatgaatacaacaaaagaaagctgttgactagtttccctcatgaatacagatgaaaaagttttaaataataaaccatagctagtggtgtattaaaagaataagctgttttcagcaagaaggtatgagaacaattttttaattaaaaaaaagaaaaaagaa

SEQ ID NO: 12951 - DNA, 2523 bp, Homo sapiens
aggcattaggaagccttctttagagttcaaaattttagaagcctaatttgctcttacttccttcaattatgtgccatgtgttttggtttgtatatgttttaaattgtatatttccttggaatatgcttgaaatatttaagaatacattttcaaaatgtataatactgtattgttttgttgatcagaataataagtctcagttaaatgtttgttattactgatagtcaaaatgctcaatagaaatgatgagaggcattggttccaattcattgtcaaatgaacgttttctaattttgttcacagattctttccctttcgattgttctgtatgttaagatagtggcttctgctctcactgttttcctatttatattactagcaggtaggagtgctaattagaaaaacttagatggtattgaaattacagttgacaacttatatttttatgagatggagaaaaaagattaagttgatataacaacaaagtggactttttttcttccttatcctgcacgaaatattgcccttgtttcctctactttcctcttggtgttttctctttttttcaaacagaaacaggccaattccattttcttgagcaagaaagcttagtgtgttacttcatcaaggccagctaatactgtgttaaaccgggctgaaaatgagaaaacttgggagatggaggaatggggaaatggcagtgggataggtagggaaggattactcttaattgttttaaaagccataggaaagtcttccttgtacgtggctgtaaatttataagaactattgtgtcacataaaccaacaagaatgaacctttgctgcttcagataatttgatttttccagcaaggaaattaataagttactgattcttcagcatagaaacaactgagaagaattaatgcaatgtttcttcactagaaaacccaacccttcatttcttttcattgctccaaaacccagttttcaactaatggttttctcattaaactaaatgtttagaaaagttgtttagagtttttctttttcttttacatagtcctcctgatccagtataagactatttagtaacgtgcatttgtatggtactatctaaagtaagtcagattgatgttagagatcgggtagctgcggaacaaaattagttatatcctaattaggtacagtgaatgacacaaaatcattttagcaatgcttcttaaccttttggggtcacaggcgttttgagactgatgaatcctagggacttatttacccaggaaaatgcgtatataacatacatatctccctaaagtttacaatattgtagtggttcatgggccccctggttaagagcccattctaaagtacaatagggcatcatcccttttcctgcaaagcccaaaagtatatttctagggcatgaaaataacttgagtctattttaaggaattgtttcactctagaggtagataggggacctggctagaatctgacattaaaatatactttttaaaaaatattatatttggggtggggaaagtgatttaaaggtgaaaaaaaaacatagtattcagaagttttggaggttaatgtctttctctaagatttgccactttagaaattcaacagaaaagaggtaaaacagaaatggaatgtatctggaacatttttggcctccatagtgcagatatactatattaacaagtaatacatttatttacctgtcagatctccaggttttaagattttgagctttctagtattaggattcattaaatgttcaattcatttcatattctaaggaattaggttatttacttactaattcaggatgttaaaataacatccaagtcggacaaccaccaccaatgcacacagttaatgagatttctaaaatataataagtacaatgtaacaaacgtatagaattttgcatttgttgccaaaattagatgtttaatgacagcttatttaattcccatttgtgggacttctggaacatagaaaccattatcttacctggttatcccttgactaaatagcatatctgcaggaaaatatcttgtttgtagtgatatgccccaatagtgattgatttcactcttgaaatgagttatatcacttaatttgtataaatgttatgagtggagagacatgtacatgttaaaagcatgttgcattatatattcattttttaaactctataaatgttaagaataatataattgcagaaatatttttcttaaatacaatgtgtaacaaaattctccgtagcaactcacccactttgcagtttatgtgatccacacttttaaagaaattccataaatgtatattttgtattatgtattatttcctggtccaaagaaaatatgtgaattcagttctaactttaagaatgtactgtttgttttcaagttcattgaaaaattgcattcagcctgcgaatggttgcagattgtatgttagatgaaaagtagaaataatttctagtttggaaaactggtgccactaaataaacaggcaattacataatg

SEQ ID NO: 12952 - DNA, 443 bp, Homo sapiens
ttggactgaagaggcttaagcccattcagtatccttgattgcatttatccaacggcctttattcttcctgctgacagcagtaactcagaggaataggtagtagatttctgaaaattatccagccatggaaatgtaggtggggtttgagtttaaggcatttaaaaatgtaaatatctctagctaaatttatcttaagtagaactctgtgtttttgtaacacactgccagtgttaatatcaaattttagccaaattattactatgtgttttaatattttaaaataatttcactgcccatctttactggacaaactcatttggagttcaacttgtgatttctgaaagaactgatgaaattgggtactgctttttttctccatttttcgttttgttttaattttgaatttcatggtatatacttttagttcaaactcagctgtttgt

SEQ ID NO: 12953 - DNA, 85 bp, Homo sapiens
  SITE (20): n equals a,t,g, or c
  SITE (21): n equals a,t,g, or c
  SITE (22): n equals a,t,g, or c
  SITE (82): n equals a,t,g, or c
  SITE (83): n equals a,t,g, or c
  SITE (84): n equals a,t,g, or c
ttttttaaaaaaaaaaaaannnaaaaaaaaaaaaaaaaaaaaaaaaaaaaaaaaaaaaaaaaaaaaaaaaaaaaaaaaaaannna

SEQ ID NO: 12954 - DNA, 148 bp, Homo sapiens; identical to SEQ ID NO: 6787
  SITE (136): n equals a,t,g, or c

SEQ ID NO: 12955 - DNA, 158 bp, Homo sapiens; identical to SEQ ID NO: 8242

SEQ ID NO: 12956 - DNA, 126 bp, Homo sapiens; identical to SEQ ID NO: 6134
  SITE (9): n equals a,t,g, or c
  SITE (10): n equals a,t,g, or c
  SITE (14): n equals a,t,g, or c
  SITE (20): n equals a,t,g, or c
  SITE (95): n equals a,t,g, or c
  SITE (107): n equals a,t,g, or c
  SITE (108): n equals a,t,g, or c
  SITE (110): n equals a,t,g, or c
  SITE (118): n equals a,t,g, or c

SEQ ID NO: 12957 - DNA, 8430 bp, Homo sapiens
cttgggccgcatattaacactaacaatagctgaagaactaaaaagaaaagaaaaaagcaaaaacatctcaatgttttaagaaagtttatgaatttgtgttaggccccattcaaagccatatcctgggccacatgcggcccttgggccgggttggaagcttgccctaggaattttagatggagacgctctgtcttgccgggtgtagcacccgctcctgtggctcctttcctctccacactggccaagcaggagctgaatgctttggaggctccctgggcataaggcccaggtgaccactatgtgttggtgctcagcctttgcacatgctgtccctctctgtggaacacattccctggcccgcacatcttcctcacccccaattacctcccgggctccacacagtgcatttcctcaggtgctgcgctgaccagtgtggtagctgctggccacgtggctatggagcccttgaaatatttgagttccaatcaagatgtgtaagatacactccagatttcaaagcaaaagcaaaaacagctcattcacactttttatactgattttatattgaaatgaaaatattttggatagactgggttaaaaaaaaattaagttcacctgcttctttttactttttgaaatgtgactgtcagaaaatttaaagtcacatatgtggctcacactatttctgtgggacagccctgcctctagctaggggctttggtgagaaccagatgagttgatgggtctcctctgggccctgcttccctggctgctgaggtgcaggaactgtgaggggagggcagcctgtcacggtgcccaacacagggcagggctggacaggtacaagtggaacaggcggataagctgggaagggcacagagaaaaggagctcctcgtgacagcactttcccaccttttattattcaacacatggaagggggtggagacacaaggatagggcaatggtgagtttcaataaataagagaaacaggatggacaggcagtgggcccatgcctgcacggccccacataaataaccaggttgctgagccagagtggaagtcagggctgggcctggcagccgcctgcactgcccagaagcactggcaccacagggacacagaaaccactgaggcccaaggtgtgctccagccccaccaagtcttctccctaaagctcctgagatcttggggctggctgggcaggctagggctctgtatcacagtcctgccgggatcaagtctattttttcagtttcattaaaaacagctgggggaggggcaggcacatgcattaagccccttccgtaggcagagccatggatggacagccccatgggggccttgaaggcagaggccctggaagcagcaaaaacggggctggataaagctactaatgggagggatggtagagcccagctccccagtcccccacaacccagcccagaacctacaaagagctgaagaggccctgggtactgagacgtctctccttacttcacagtcagaaaaatggacccagcgatggccacagatgtgcccaagattagaacccagggactcactctcctagcccaggactttctgctaccccttccctttatagacctgctggaagaggagggggacgcacatctgctctagggccctgtacagaggcaagggtgtggctaattaccaaggaatggggccaggggtgacgggcacaggcccctcccctctgccaagcccagcctctgatgatacagagaatcccgtgggctcctaggatccagccagggcaggcacgggggtcggggcatccttcaggggagcaacatggcagcagggccaggggcggggctcagcctgctcctgtacacagtgcccgccggccacctgcctcctcactggggcagacgctcccacctccaggccttggtctttgctgtctcgtctgctgggccattgcttctcggtcctcacagtcccagctgcagctccacctcctccaggaagccttcggaacctcccagggcagggccgcagtgtccttagactagaacgcccctcagatgaccaggttgctctcacttagccggaccacatagcggttctcctggtgggcagggtgaggggtcagagctgagtcaggggctggcttctggctccaggaaagtggcccctgcctagggcccgctgcacttccacccctgccccgtcttcggtcagggttggcccaggtgccaacagatgcctttctccttgactctcacctcggccttgttctctgctgggggcttcagccactttgtacggcttccgccacttcctagcagggcctgctgctcaggggggaggccaggctgtggggagtcagggagatcaccccacgagggcccagcctccgtgatggtcttcacctcagacaccattgaacttgtccgctgctcaggaattcgagccacgcggaacctgtgaggagagtggggcaatcatccccgttagcggggatcccggggcacagagaaggcagcacgtgcccggggtcacacagcaagttcatggaccagagccttagcctgagaggcccgggtgccatgggggccaagatgctgccctagggatgcaagggctccatgtgagacacaacataaccggaaagtcctgatctctctggccgcctccactgcccagagaggcccaataagggcagggctcccattgagcagggtgctcagggcccaagctggggccctgcctccccctcccggcccccaggctgtcacgtctttacctgcccctgctgcatctgtgcccatctcacctgcccacagacaagatggtgatctcgccctgacgccctgccttggccccggccttgggaaccctggtcgggttaggcagaaggctgggaacaggagtagtggcggctacagcctcaggggacagcagcacctcgggccacttcttctggctacagcgggagcagcaggggccagagagcgaggccaggccctgcacggtgtggagatggtggcggtgcgggcagatgtgtggcacgttcgggggcgctggcggcagcctgcagggggcacaggcagaagtggccataggccaggccaggggcaggagaccccagcagggaacagggtgacttgagggagacccaagtgggagatccccaggaggcaggctggttaatgtaggttttggccccgttatctcccaccagcccactcacttggacacaggcctgtggctcgtctgcaccagctgtttgctgtggtactctttcagcagctcctccagggccgcagcattctctgtgggtagctgcagtcagaccctcactgtggccatatgggacacacctcccaccccctgccccagcagagaaccccccacctaccctccataccaccactcccagcctgggctgtgcgccttttcctcccacttcatcaggcaagaatgggaggcagaggtgtgcactcctgggtcagagagcaccaggctgcttgaggcaccctggcagggaaggcagagcagggcaagactctgcccaccgcggctgcctcacaggctcctggaggaaaccctcctctcctgggcactgggatggggtcagaccttctcctcacctttcttctctgtgatcaagcgcaccaggaccccaatggtgtcctcattggcatcctcagtccggtaggcagggttgattcctggggaagagaagggccctgatcctggggaagagggggaagccgcactcctgagctaaaccatgatctgccagcagagggcaaccctggccttcttaagggccctgagcatgtgcatttaggtgacaagcctcccagagcccctgcaaatgtgggatccaggctcagagaagcccatatcaccttcatgattcaacaccagtgcttcctgcacccaacagcccgggtgcatagaggcttcagggccacgtgaactccagtcattgaattgggcgggcgagggggcggtgcgtcagcgtcttctgggtctgcactgtctcctcctcagcctcaaggagctgtgggctgccaccctacccagaactccccaaatctacagcaaactgctattccatggcctctctactgtgccctatgtaacaatttaactgagtgcccctagtcagctttgggcccaaatctcaagggtgtgagaatgggccacgatgatcagccctgggcccagcagcaaacagagctcccaggacttgcacccaggcagcatccagcagttaaagggaagtctctaggaaaacaagcacagtcccaggcaaaatggccctgagtcaccacgtttcctcctgccggcttactgctcctgtccgcttcctgcccccgccagacttcagtgtcaggacttagaagggtctctggctcccatgccagccccagacagccgagggtgctagcatgggagatgccatttcactcttgaggtagccacaggctcccatgggcccagggcagggtgtgtgcgagtgggcccctgccctgcaggggagtagtggtgtggggaagaaggaaaggggcccggggccctgggggtgaaggtggtggcgcatgcctgtccctccggttccaggccttgtaactcaaactacagcctggaaccaaaacccgagccccttatggtgcctgcccaggacaggacagctgccctgccagccctcctgccacagggcactcctgctactccaggccagaggtcagaggtcaccttgagtaactccaaggccaccatccgaccctggaaccatacacacaactgtggcctccaaagagtccagatccccacatctggcaaggcttcacccagggtaggatccactgaagcacttgaccagctgtgccacctctgctctgcccccacggccacaccttcgtccccttacctttcctcccatgttgtcagtctgcagctatcacctcccaagcctctccctctcagaccccagaggccaggcaggattccgctggcagcccccaagtggagctggggctgggctcgtgcccccgtccttcccacctggaccccagctgggcctcaccactgcctccacctccagggccgggcccgacctccttgtgcgccgtgcagtggtagcccttccgcttgaggaggttgcacaccaggatgcccaacagccccatgaggcagaagacagggacgatggcgatgaccgcgtactgggcggctgtctcctctgggccacctgcccgggtgccgttcccaggctgccgtgtctcaccaccgctgctggcccctgctgccacctccacgccacgtcgggcccgccgcccccactctgagcatcacagacgatggaggcaggacaaaagcagagtgacacaaacacagagagacaggggcccagggcccgagtcagtgggggctgcaggagagccaatgtgcccaggggagcccactccccgccatgctggggatgcaaaggtcaacccactgccctcctgttttcccttctggccatcgaagcattgtcctgaacaaggcctcctcaggacggccagacacccagccccaccctcccctcacgctggggtcagggggtgaagagatggcacacaggacacatgtctgggcacagggacgtgggatctgcctccctgtggcctggccatgaatctagtgcctcagggggtgactgactcagtggcgggaggaggtgcgtgtgggtatgtgagtgtttgcatgcgcacactcatctgcatgggtttttttaggcagggtctcacttgttgcccaggctggagtgcagtggggcgatcacagctcactgcagcatgaaaatcatggactcaagcaatcctcccgcctcagcctcccgagtagcaccaccacgcccggctaattttttatttttattttttgcagacagggtcttgctatgttgcccaagctggtctcaaagtgatcctcctgccttggcctcccaaagtgctgagattacaggcatgagccactgcacttggctggcatgaatctctttgaagggatggggacaggggacaggtcagtatgtgagtccccagcccccagctgtggctgccatctgcaggacactctctgccactcggaagcatggtgggcagaaacagccaggggagcggctgactgtgccctgctggagaccctttggctgcacgccctgccctgggctggaagaaggaccccactgcccccacatgaacactgcagaggctgctgggctccaactcactggcccctcccgcacatacccctgcaccagtcctagccccagtctgccactcaccatcacagccatgagtacccagaggtgcccaggaacatggttgacatggaacgcggggaaccccccaaggcccaaaccacctgcgaggagggaagataccactgaggcccagaagtttccccaaacactatccttaggagaggctggattccttcctaccaggcaccctccgtggtcctgccccatcccatttcacagatgggaagaatgaggcctgctcagggtacaataaggctggggccccaggatccagagtcctggtcacccagccaggagccctccccgcactccctttggcttacccaggccagcagtctccacagagtgtatctcgagttgccatgcccacctgggcctccagcctcctccaaaggctgcaacgggcatggggctggcatgggctggagccccatgcagctgagaaggtgcctggggggcagggcctgcataatgtgccctgccctgggtcctgtgggaggtaaagggtgagagcatggccaggagccaagcctgaggacccttgggggccaggcacaggactctgcccctggccctcagggccctcccaggacaggcaggagagcagggcaatgctcaccaggtcgggctcctccccaggtgggcactgccaaagggttgttgatgtcagggtggcgagaggccagggcagcagctagaagaacagtaggcattgaaagaggcagaaagtgctgggtgtggggtctctggggtcatctatcccccacctatttcctgaaaccccagtggtagggaccactgactaccccacccgggcttcagggacacactcttctaacctcaatccctcacactgaggaaaacctgtcctgtcccagacctgctgcaagaccagtacctgggcaaggagagagccacatctggctctggaaagtgctggaaagccccagataaggccacatcaggatctcaagcccttccagctaaccagaacgatgaggaggaaatgcttccgaatcctctctcgtattctgcccccacttcctcctactttgggtccatccctggccccatcacagctgggcatatcattaaccagcctcatttataatccctggagccaagtctgcaggtggcgcttcctattctgggctctcccttcagcgaaagtctccaggaccacatcctcctctgcaatcttccctcaaggcgaggctaccccattcacacccacacacccaaacagggagacgcatcccaaaagaaagctccatcttctcagtgtgtgtccccagcccatttcactaggagttctctctgcttcccattcttaggaatgaactgtctctcctgaatccctcctagagtcccccaatttggcctaggctggatgaggctaccatcagctgccctggagatggaatagggatctcctcagaccccagagcggctcccagcacctgctaaggctggaaggcctcctgtacatggagcaacccttagcaaggcccaaggccaagtctcaccctccctgagcttctagcgtcacagcagaaagatgggccccagggcagaccccaagatgctgcaagtctgtaatgtggacttgcctgcagctccgggcagctggcctgatcctgtgatcctgggacctggaatctgggatcccccagaccaatacagatcttgaaccccagcacctgaggtgctatggctctcagggtccaaatcccaggcctcttttgcccagtttcctcttggtgcccagcataccctctgggctgggctccgttctcatgcctgcgtgccaatgggcatcttgccctcagccatgcctgccttgcccataaatgccagcaagcccttcattctccatctccctgacaagcctgggtgggcccagaggtgcttcctagggtccagctgcctcagattcttgacgagctgagtaactgagccctgcccagcagggggttccccgggagtgtctgcaccctcttgctggagggctgcagggctgagggtgcggcttttctccttcccagggcccatccccagctcaccataaggaagcaggacaggggccggcacagcagacttggcttcatcctcaggcccctggtggtcgccggcct

SEQ ID NO: 12958 - DNA, 688 bp, Homo sapiens
agcagctggcaaatagggactccaaacacactctggcagccgcaggaaatacttatttgggtacactggtgatgcctgctagtcccctacaatggacaccctgtcctacactttggcatccttttctgctccagaacatccctcctgatgtccagcctctgtttccttcccctcttctggtgcaggtgaaacatctcctggatcttcagaggtgtccctccccttcctgcccacctgaaaagccctggagagagacacctgtgccctaggtacccaaggagagtcaaatcccaaagcacatctgcccagggtaggaggaggcccccagcttggcttctgctcaggagaaaggcccctgccccctgtgaagccaggcctcccgacagccccagcatggccgccccatagctgccctgtgcctgctgcagacaggccggggactcccacaggctggtcctctccacacctccccaggttccatcaggtgtcactcttgttcttcagcctctctctgaggccgttagtttaaatgtgtccctctctcccgtctttagacaacataacaaacaataaaaccctaaattaactgaaaattgtctctccccagagcctgaggccccacccagctatggcctgccaggcttcggcagggagctgtctccctcaatccacctggccctggccctgg

SEQ ID NO: 12959 - DNA, 576 bp, Homo sapiens
tttcctttacccttcaaagctcaacacgaaggcctctctttccagaagcttctctagaagctttccccaaagtgggtctggctcccacagctccccaccccatctaggtcctggtccttctgcatggccactgtccacacctcttccagggaggctgactcctcccttgaggctggaacatgtctggccacagctcttcccctggcagacctatggggctggggtggtcacggcagccagtgctctgtctttgtcatctctccagcacctactgcgtgcgggcactggagaaatcggtatgaacaagacagacaaggtccctgtctgcagggagctccatcccaggggagacccaactgcaaacagagaggtgcccctgccatttggtggtaagtgccaagaaacgaaataaagcagagtgggagtgcagtgtgtgatacttcagagaaatatccatggtggcgtcacggcccaccggtctgagactgaggcccccaggcccagacggtggcctgctctggagaagcctccggccagtggacgaggcggacacagcaggacaaaggattcacatca

SEQ ID NO: 12960 - DNA, 3471 bp, Homo sapiens
ccggcgccccagcccgtctcccggccccgggcgcgcgggaaccccgggtcctgcagcctcccgagtgcggagaggcggggccgcccgctgccgcccggctgcctgcgccccctcccgcggccccggctctgggagcggggcgccccgcgcgcgggcacacggcggccagagcgccgaggcggtaccttcagcctgcaatgagaggaacccgggagagcccccgggagccagcgaagagcttggctgctgcgtccagggctgctgctgccgccgcggctgcttgaaactcctcaaagttgagagccggctagagggtgccgcccgccgggagccggagggaaaggaagtcggaaggtgcaagagtgacagacacggacagacggacgcgcagaccttcggaaggcactgcgtaggcagcctccccggagcccacgaggctccccagcaccgtgagttttttcctggatgggtggttgctaagtatttccgtttaattgtttgtagcgtacgtttgcgtatagttgtgtctgttggagggagtttaaaacaacaacaacaacaacaacaacgcaggatgcaccttaggaaaaaattgagtttctgatggtgggtgagacggtgggttgtatggagagaatgtgactgtacatttttataagcaggactaacccaggaaagaggaaaaaatacatttaacagtgaagaggcaacacagagctccctattgtgaaataaaacccatttcaaaagttattggaaagaaagtaaggtatggctcttatgggttaactagtggtagtcagtttctgctttttactccctctgaattattaattgtttgccaggttcactggtgggaggctgagccggtggaaaagacaccgggaagagactcagaggcgaccataatgtcgttacgtgtacacactctgcccaccctgcttggagccgtcgtcagaccgggctgcagggagctgctgtgtttgctgatgatcacagtgactgtgggccctggtgcctctggggtgtgccccaccgcttgcatctgtgccactgacatcgtcagctgcaccaacaaaaacctgtccaaggtgcctgggaaccttttcagactgattaagagactggacctgagttataacagaattgggcttctggattctgagtggattccagtatcgtttgcaaagctgaacaccctaattcttcgtcataacaacatcaccagcatttccacgggcagtttttccacaactccaaatttgaagtgtcttgacttatcgtccaataagctgaagacggtgaaaaatgctgtattccaagagttgaaggttctggaagtgcttctgctttacaacaatcacatatcctatctcgatccttcagcgtttggagggctctcccagttgcagaaactctacttaagtggaaattttctcacacagtttccgatggatttgtatgttggaaggttcaagctggcagaactgatgtttttagatgtttcttataaccgaattccttccatgccaatgcaccacataaatttagtgccaggaaaacagctgagaggcatctaccttcatggaaacccatttgtctgtgactgttccctgtactccttgctggtcttttggtatcgtaggcactttagctcagtgatggattttaagaacgattacacctgtcgcctgtggtctgactccaggcactcgcgtcaggtacttctgctccaggatagctttatgaattgctctgacagcatcatcaatggttcctttcgtgcgcttggctttattcatgaggctcaggtcggggaaagactgatggtccactgtgacagcaagacaggtaatgcaaatacggatttcatctgggtgggtccagataacagactgctagagccggataaagagatggaaaacttttacgtgtttcacaatggaagtctggttatagaaagccctcgttttgaggatgctggagtgtattcttgtatcgcaatgaataagcaacgcctgttaaatgaaactgtggacgtcacaataaatgtgagcaatttcactgtaagcagatcccatgctcatgaggcatttaacacagcttttaccactcttgctgcttgcgtggccagtatcgttttggtacttttgtacctctatctgactccatgcccctgcaagtgtaaaaccaagagacagaaaaatatgctacaccaaagcaatgcccattcatcgattctcagtcctggccccgctagtgatgcctccgctgatgaacggaaggcaggtgcaggtaaaagagtggtgtttttggaacccctgaaggatactgcagcagggcagaacgggaaagtcaggctctttcccagcgaggcagtgatagctgagggcatcctaaagtccacgagggggaaatctgactcagattcagtcaattcagtgttttctgacacaccttttgtggcgtccacttaatttgtgcctatatttgtatgatgtcataatttaatctgttcatatttaactttgtgtgtggtctgcaaaataaacagcaggacagaaattgtgttgttttgttctttgaaatacaaccaaattctcttaaaatgattggtaggaaatgaggtaaagtacttcagttcctcaatgtgccatagaaagatggggttgttttccaaagtttaagttctagatcacaatatcttagcttttagcactattggtaatttcagagtaggcccaaaggtgatatgactcccattgtccctttatttaggatattgaaagaaaaaataaactttatgtattagtgtcctttaaaaatagactttgctaacttactagtaccagagttattttaaagaaaaacactagtgtccaatttcatttttaaaagatgtagaaagaagaatcaagcatcaattaattataaagcctaaagcaaagttagatttgggggttattcagccaaaattaccgttttagaccagaatgaatagactacactgataaaatgtactggataatgccacatcctatatggtgttatagaaatagtgcaaggaaagtacatttgtttgcctgtcttttcattttgtacattcttcccattctgtattcttgtacaaaagatctcattgaaaatttaaagtcatcataatttgttgccataaatatgtaagtgtcaataccaaaatgtctgagtaacttcttaaatccctgttctagcaaactaatattggttcatgtgcttgtgtatatgtaaatcttaaattatgtgaactattaaatagaccctactgtactgtgctttggacatttgaattaatgtaaatatatgtaatctgtgacttgatattttgttttatttggctatttaaaaacataaatctaaaatgtcttatgttatcagattatgctattttgtataaagcaccactgatagcaaatctctctccaaaattcttaa

SEQ ID NO: 12961 - DNA, 1975 bp, Homo sapiens
aaccgaatccttccatccaatgcaccacataatttagtcccagaaaacagctgagagcatctaccctcatgaaacccctttgtctgtgactggtccctgtactccttgctggtcttttggtatcgtaggcactttagctcagtgatggattttaagaacgattacacctgtcgcctgtggtctgactccaggcactcgcgtcaggtacttctgctccaggatagctttatgaattgctctgacagcatcatcaatggttcctttcgtgcgcttggctttattcatgaggctcaggtcggggaaagactgatggtccactgtgacagcaagacaggtaatgcaaatacggatttcatctgggtgggtccagataacagactgctagagccggataaagagatggaaaacttttacgtgtttcacaatggaagtctggttatagaaagccctcgttttgaggatgctggagtgtattcttgtatcgcaatgaataagcaacgcctgttaaatgaaactgtggacgtcacaataaatgtgagcaatttcactgtaagcagatcccatgctcatgaggcatttaacacagcttttaccactcttgctgcttgcgtggccagtatcgttttggtacttttgtacctctatctgactccatgcccctgcaagtgtaaaaccaagagacagaaaaatatgctacaccaaagcaatgcccattcatcgattctcagtcctggccccgctagtgatgcctccgctgatgaacggaaggcaggtgcaggtaaaagagtggtgtttttggaacccctgaaggatactgcagcagggcagaacgggaaagtcaggctctttcccagcgaggcagtgatagctgagggcatcctaaagtccacgagggggaaatctgactcagattcagtcaattcagtgttttctgacacaccttttgtggcgtccacttaatttgtgcctatatttgtatgatgtcataatttaatctgttcatatttaactttgtgtgtggtctgcaaaataaacagcaggacagaaattgtgttgttttgttctttgaaatacaaccaaattctcttaaaatgattggtaggaaatgaggtaaagtacttcagttcctcaatgtgccagagaaagatggggttgttttccaaagtttaagttctagatcacaatatcttagcttttagcactattggtaatttcagagtaggcccaaaggtgatatgactcccattgtccctttatttaggatattgaaagaaaaaataaactttatgtattagtgtcctttaaaaatagactttgctaacttactagtaccagagttattttaaagaaaaacactagtgtccaatttcatttttaaaagatgtagaaagaagaatcaagcatcaattaattataaagcctaaagcaaagttagatttgggggttattcagccaaaattaccgttttagaccagaatgaatagactacactgataaaatgtactggataatgccacatcctatatggtgttatagaaatagtgcaaggaaagtacatttgtttgcctgtcttttcattttgtacattcttcccattctgtattcttgtacaaaagatctcattgaaaatttaaagtcatcataatttgttgccataaatatgtaagtgtcaataccaaaatgtctgagtaacttcttaaatccctgttctagcaaactaatattggttcatgtgcttgtgtatatgtaaatcttaaattatgtgaactattaaatagaccctactgtactgtgctttggacatttgaattaatgtaaatatatgtaatctgtgacttgatattttgttttatttggctatttaaaaacataaatctaaaatgtcttatgttatcagattatgctattttgtataaagcaccactgatagcaaatctctctccaaaattcttatagtaaagttgatttttttaaa

SEQ ID NO: 12962 - DNA, 506 bp, Homo sapiens
ttttagggaacagtatgtagatccgctgctcggtagcattgaaaagtccctattggatggtgttaaaaattactgtccctgccccttaaacaccaacctcaccctttggacaatatccttcagagccaaagatgttacaagcaagcattttattctgcttactgccattaaaataattaggaagaattctgtgacttgtatgaccttggaaatcatcacctcttcttgctttatagaaacgcagactcaagagatgctgtgatttgtttaggatcatacagctagtctggacacaagggaaacctcttgatccatgaaagctctccagcaatgtgatattccgggaatgtttaatagagctaggaccatcctctgacaaggaagttggagagaggattcctaaattaaatctttttcggaagggaccgctaaggttcttccattcctcaaatccttgatcctatgaaagtaagtgttgcatttgccagggaaatatggacagtgct

SEQ ID NO: 12963 - DNA, 266 bp, Homo sapiens
gtctccaagggtgagacccctccctcggtggctgggcgtgtcccctttagccttcctggaccccattaccgcccggcttggagctggacgaagggacgtaattggtaggcgagtgggttgggcatcttgactcaaggaccagagtctgggcctctggtgtggacccctgccccctccccgctctgcgcggccgttctagaggtccgggtgggagctggaggaggaaagcgggaggaggcggcgaggccgcggggcggtatgagggg

SEQ ID NO: 12964 - DNA, 1207 bp, Homo sapiens
caggactgcattttgctccggagcgtccagagtcctggccctgagcgggaatcgcagtggccgaggctgagcggcaggtagaaggggcgtctccggggcttcacagggaacacaggggcttcggcccaaccacaagtacgcagttgcacatgccctacttttgcccattctttgcaaatcccctaaggaacgaacgcgcctcgcgtgcgggcctttctaatcttcgcttgtcccttcacttccacagctggaggtcgaattcaccacgtcacgtagagaaaaggggcggtgtctcgggtctccccgtgtggcatcaaggcgggctccctataggagctggtgtggacgtccgggcgtggggttagggcggatgcggggatcgcggggcgggtgttgacattgtgctctcaccaggcggatcgccccgaccctcactcctggcgtctgagtctctggcgtagcccatgctgagtgggcggctggtcctgggtctggtctccatggctggccgcgtttgtttgtgccagggcagcgcgggatccggggccatcggtccggtggaggccgccattcgcacgaagttggaggaggccctgagccccgaggtgctagagcttcgcaacgagagcggtggccacgcggtcccgcctggcagtgagactcacttccgcgtggctgtggtgagctctcgtttcgagggactgagccccctacaacgacaccggctggtccacgcagcgctggccgaggagctgggaggtccggtccatgcgctggccatccaggcacggacccccgcccagtggagagagaactctcagctggacactagccccccatgcctgggtgggaacaagaaaactctaggaaccccctgaaccccaagagagggaggaccaggatccgaatgggctgggtgagcacgaattaccgaggccttccctttgatacagtccaggatttgtaagggatgaagacccctgggccccattctgttggggtccatacatactctccgaagatagcaacttgcttcaggtcaaagtgaacccgagaaaagagaagaatcactcactactgctcttgccctggactattcaggaagggcagcccggatgttccatgttaaatcgtgacagaattgcaccagacctgatgagttggaaacaatcctatacattaaaagaaattacactatgaggctgtg

SEQ ID NO: 12965 - DNA, 1207 bp, Homo sapiens; identical to SEQ ID NO: 12964

SEQ ID NO: 12966 - DNA, 3901 bp, Homo sapiens
attttgatagatagttttattataaaaaattggctttttgattatggaagctaataaatcccaagatccccaagatcttcacggtaagttggcaagctggagacccaggagaactgatgatatagttccagtccaagttcaaaggcctgagaaccaatggtgtagttccagtccaaaggccgagtctaagacccagatggagccagtgtttacttctgagtctgaaggctgagaaaagccaatgtccgggtctcaaagcagtcaggcagaaggaagtctctcttactccggagtgggtcagtcttttgttctagtcaagctttcaactggttggatgggacccacctatattagggagggcaatttactcagtctccaattcaaatgttaatctcattcaaaatactctcacagaagcacccatatttggccaaatatctgagcaccaatcctctagaagttgggacattaaccatcacaggccgtgcgtggtggctcacgcctctaatcccagcactttgggaggctgaggtgggtggatcacctgaggtcaggagtttgagaccagcctggccaacatggtgaaacccccctctccactaaaaatacaaaaattagccaggcgccattgtccacgcctgtaatcccagctactcaggaggcggaggcacaagaatcacttgaacccaggagacagaggttgcagtaagccaagattgcatcactgcactccagcctgggcgacagagtgagactccatctcaaaaaaaaaaaaaaagttaaccatcacaggtagagtttaataggctttatctctgaaacttagtctcaaacagtccagaaaataattatatatttgtagataggtacatacaaataaaacaaacagtgaattgttaatatttgggtaatctaggtatcaggataaaggatatacaggaattatttgaactgttttttttaactttagatgcacaaaccttgtaattatccttgacactttccctcccacaaccaagccattaccacaccctgtaggttttactttcctaatatacatcctgtagccacaatttctctccatttccaccaccaccaccaccaccttggtccaaatcatcatcatctctcacctagactgctacagtaacctcccaacttgtctccctgtttccactcttgcctcctctacaatccattctccaccctgaagccagtgatctttgcagaatacaaacttaaagtcagctaaatgcaatgcatgatccttgattggtttctgaaaattaaacatttataatgtttacttagactgtgctgctattacaaaataccactgactgggtaatttataaacagaaatgtattttctcacagttctggaggctgggaagtccaagattacggcactggcaggtttggtatctagtgaaggccagttcctcatagatacgccatcgaggtgaccttacatggcagaagggacagaaggggccaacttaccccctcaagctctttcaaaaggcgttagtccattcttgagggtggagccctcatagccttattacctcctaaaggccccaccacttaataccaacaccatggattaattttcaacatgaattctggaggagacatattcaaactatagtagacaccaatgagacagttggggaaatctgaatatcaactgtatgtgattatagtattgtatgaatgttaaatgtcttggatgtggtaatggtattgtggatatgtatgaaaatgtccttgttcttaggagatacacattgaaagtacatagcaattaagtgtaaagaattttgtggggccaggcgcagtggctcacgcctataatcccagcattttgggaggccgaggcggactgatgacctgagtcaagaccagcctgaccaacatggagaaaccccgtctccactaaaaacacaaaattagccagagtggtggcgcacgcctgtaatcccagctacatgggaggctgaggcaagcaaatcgcttgaacccaggaggcggaggttgctgtgagccaagatcgcaccattgcactccagcctaggcaacaagagcgaaactccatctcaaaaaaaaaaaaaagaattttgtggctgggtgcagtggctcacgcctgtaatcccatcactttgggaggctgaggcaggcagatcacttgaggtcaggagttccagagcaggaggatcacttgaggtcaggagttccagaccagcctggccaacatggtgaaaccccatctctactagaaatgcaaaaaaatttagccaggtatggtggcaccagcctgtagtcccagctactcaggaggctgaggcaggagaatcacttgaacccagaaggtggaggttgcagtgggccaagatggcgccactgcactccagtctgggcaacagagtgagactctgtttaaaaaaaaaaaaaaaaagaattttgggccaggcgcagtggctcacgcctgtaatccctgtaatcctgggtggccgaggagggtggatcacctgaggttgggagttccagaccagcctgatcaacatggagaaaccccgtctctactaaaaatacaaaattagccgggcatgttggcacatgcctgtaatcccagctaatcaggaggctgaggcaggagacttgcttgaacccaggaggcagaggttgcagtgagccaagatcacgccattgcactccagcctgggcaagaagagcaaaactccatctcaaaaaaaaataaataaataagatttctgcacctaactcaagtgattcagcagaaataattattattatttcattattattatacacacatacattaaaagagatacaaagccaagtctggcaaaatcttatcagtgaacctaggtgaagagtggataaatgggttgctcattgtattaatcttgcaaattttctggaagttttaattttttttaaaggctagggaaaacagtgtatgtcatagtttaaatttcttgagtgtgataaggttattgtggttatgtatgagaatatctttgttcttaggagatacatattggagtagttaggggtgaaatgtcatgctatctgcaacttactttcaaatggttcatccaaaaaagcatataaatatattttaaagtatatgtaaagtacttaaatatatgagtatatatgtacaagtataaaataaatataaatgcaaaaaatggtgggtcaagtgaaaggtagagggtgttgctttgaactattcaacttttctgtggctttgacatttttcaaaatgagaagttggggaaaaacatttagaaatatgtaaatatattaaggatacaaaataaaatttaaataattttacaagttaagaatcatcctggaaaaattacatcctgttacatccctgcttaaaacctcagtagcttcccactacttctaggataaagacaaaattgcctaacaagggctacaaggcctggggtggtctggcccgttcctctcctcctggtaccctactcatcaccatcagctgccccctaggctccaaccacacataaccacaccctaactacaccagaaggaaagactccctcaaaattctctctcctcctgtcctttacacatgcagctaccaaagccaaaacctcactatgagggactgagaaatggattctcatgttgtttctgctgaactgtttccctaaatctcggaaatattctctgcccgcctcccattccacctctccaaccccggccaagtctgggtaacttgcctccttagcatcctgtgtttatctcatcgtagcacctagtacccagtattgcaattgtccgctcacttgttagtcttcagtgctctgttgtctccttgaaaacagggcctgacttgactccc

SEQ ID NO: 12967 - DNA, 15857 bp, Homo sapiens
ttttttttttttttttttttttttttgtgagacggagttttgctcttgttgaccagactggagtgcaatggcccaatctcagctcactacaaccttcgcctcccaggttcaagcgattctcctgtctcagcctcccgagtagctgggattacaggtgcctgccaccatgcccggctaatttttgtatttttagtggagacgaggtttcatcatattggtcaggctggtctcaaactcctgacctcaagcaatctgcctgcatcgacctcccaaattgctgggattacatgcgtgagccaccacgcccggcccggttaacatatatcttgaccatttctagctaaagaatttaaggtgcatgtggttgggcagtagggagtcattgacaaattttgagtacagacatgccagagagcatctgggggcagatggatctggcagtgatgtgtaagtgagttggcatgggagactggaggaacagagatcaatccagagtgagggtagaaccctgacttacaagtcatctgtgggaatggaaaggaaggagtttatttgagagctaccataaaatcagaaaatggtttgattggaacagaaatggactagagtgagaggggagtcaatggtaaccccaaggcagtggttttcagattttctcaggtaagaactcccatgagattgtttaaaatgaaacttctggctgggtgtggtggctcacacctgtaatcccagcagtttgggaggccgtggcgggcggatcgcctgaggtcaggagttcgagaccagcttgggcagcatggtgaaaccccatctctactaaaaatacaaaaattagttgggtgtggtggcaggcacctgtaatcccagcctcttaggaagctgaggcaggagaatcgcttgaacccgggaggcggaggttgcagtgagccaagatcacgccactgcactccagcctgggcaacaaagcgagactctgtctcaaaaaaaaaaaaaaacgtagattcaaggtccctatccttccaaaccaagaaaaaaaaaaagggttctgattcaacaagtcaagagtggagtctggggtctatatttttaaaaagcataccagaagatttagaggaaagttggttctattcttatgaaacattactcccaaagttttcaaatctgggagacttagagggccctccatctgtaggggaaagatcaaggtagagaggccaatttaggaagtaaatctggtacaccatgttattctgaccttcagtccatctcaccattttaccctccaaggctgttaggagaattggatgtaggtggagagtcacagaagcaggtatagccattttgtattttgaggatttgtttccgttttatttttcgtcaatatttttcactgcatttttcacatcaacagagttgggtttagggttccccaggagagcaagggagatggatgggtccctcccaggggtgcgaggaagagggctacgtccagcatgtggggagtgagggacaagggcacagggcacacactcatacactgggcactggagaaggcagtcttttgagcacagacaccaaagagttaaacagtcaccacctggtacagtgttacaaaatggggagagtgaccacagggttggggcactggacgcagcatgacgaaggtgaattttgattttcttttttgttattttcacttttttccttttaacatttttttaaacattttacaaacatctaaaaactacaacacgtcacagctacagtggggtgaggggagggcaccaaagaaagcagccacacagagtagggtgggatggggcagcctaacctacagaggctattgtgtggaagggtaaaatggggaaactgaggcttctagtccctgcattaggggtccctcactcactgcccaacctctccccactcagaggagctgccaggagggcccctgcttcctgcctctgccccagctctttgtgctttttgatctgctggtttgaccagatgcctggtttctttccctcccctgctcccctccctgtgaggggacaggtagggagcatgggagggcagctgtgctattcccgcctgtgctgtagtgggtggagcctctcactccagaggaggcctctgcttcttgaggagggaaggagatgggccttgtcggatgccctcagatctccctagactgtgggactcttatcccaggctggcctagggctcctccatcccaggctcaacacagaaaccagattaggggaggaactgtgggaggcagggttgtgtgtgcatccgctgaaattacccttggcttatatttgaggacagtatagtgataccccccgccccatggcacatgcacacacatatgtaagtatacatacacattcacacacagtcctgcggagctgcctcagaacttaatctattaataaataagaatcagaaagctaatttcataaaattcaggcttcatatttgcagcccaaattgagaggaaagtggaggccagagggctgaggtttattgcttctcccccagcatccaacaggagatgtgagagggcacccgaggcccactcttcagactctaagaagttcttttggtccatggtctacaccagagccccagcccctagcataattgcatacctgtggtttcaccagggcctaggcagagggaatgatggggaaggcaggaagcctattctggaacccctggaacagggaagcaagggcccctctctaacagggggagaaggatggggctcagccttctcttgtgcaaagtcaagggcagtgggaaatggggagtacagcttcatctcaaaactgggatgaaggagccttccctgtagtccctgcccacggggtttacacacatgcacacgcacacgcacacacagttaagacaccaaacacggggagtggggagtgagggctctggaggtcaggatggcagggcagggaggggaaggaaggagttgttggtctcacagtgtgcctgccaatcccaaagccctagagaccccttcactgcagcacctgcccccgggtctcaggcagcttcagggccagagagctgccaagggcaagggcagctgaggcaaagaggatgggtgcagccttggtgattcccacgaaggatgtgaagatgctgatccccagcacagctgccagcttacacagggcattcaggaagccaaaagctgtggtcctgctcaggagtcccccagtgcagcacggcgcaaggtacaggagggaggcaaaggaagagtggagggcagggaagtgaagtccaggaagatgcaggcagtgtccaagagggagagagaaggttggagagatcagagaggtaaaggatgtacaccaggaatgtaaataaattgagagacaaagggaaaggagaccaaaaattgaggttaacagttaagactttgaggagtagatacaaaagctaccagatttttttttcctttttttttttttttgagacggagtcttgctctgttgcccaggctggagtgcagtggtgcgatctcggctcactgaaagctccacctcccgggttcaagcaattctcctgccttagcctcctgagtagctgcgattacaggcacccagctaactttttgtatttttagtacagacagggtttcaccatgttggccaggctggtctcaaactcctgacctcaggtgatctgcctgcctcggcctcccaaagcactgggattacaggcatgagtcaccgtgcccggccaaagctaccagattttagaggagaaaatggaaatgtatatcctctcacccctaaggatgctcttcccattcagccctccttcctcaccccacccctcccctgaatccactgccctgcctccaacacattccaactacctcttgtctgaggggtagagttcaacagtcaacacgtccagcgcattccaggatgcaatgctgaccccgccaaaaaggcagagcagagcgatcatggccgactcactgttcccaaaagacaggaagaagcaggagacacaggacatcacgctggagccagctggagccaggagaggagagagcaacatgagcctggccacagtgaaacccacccacagcccaccctgtcccatcagctggctttcagatagcccaggatgagacttgttccgaaggtatccaaccaaggtatccaaaaggaaggcttttcactcctcctcaacctcccttataattgtttattaataatatcagtaaccatcatttattcaatgccagccatgggccaaggcaattgatgctttacatgcattgatctagcacatcaaccctatgacacaggtactattatcacctccattttgcagaggaaacaaccaggctcatagaggtaatttgccagaggccagaggcaggtggtggagctgagattcaaaacccataacctcaaagcctgtgccctaaccacttgcaattctgcttacctcctttacccccagagaagcttctgtgccagtccccaccccatcctgcagcaccccctaaacagaaaacatgagagaggaactctctgaccaatctcttccacagcccaaggtgagaagcctgttgactgcctcccgcagcccctggcccctactatcagatctgactcagcctctcccccttaccaagcattctgagcctgccgatcttgtccatgagcagggcagacacgatattcccaggaagcactgccagtgtccccaggaagctcacaaagtataccatgtaggcaccttcgcccgtccctgtcacgtctagcgggcagccctccttgttgtgcaggaatgtactgtttatcagacggctgttcacaaacttgtactcgaacaggtctgtgggcaaaggccaagataagcaggcagtcatagcagatgggagagggaggctgttacggcttatggctcagggctctgcatgtatgaaagttagtaggaggggctctcaaaattattcacagtgctaatcacaaaacatcaaataacatcaccatgggaactagggatctttagagcagaaaatgaccatcatctgtccaacagtgtgactttgtccaagttctcccattaatagtcttagctgcttattcattctttctgtccgtgctagctgactataagcagtagcgatgccgtggacttaggaaatttttctgagaaaaacatttaaaataataaaaagtcctatccattgttgttttcctgcaacatggaaaaagctcgcccagtatgaggtgggaaatttcagtctagctcacaaaaccagcatttcgtgtgcatatactgaagtttgagaatcactattaaaaaggagtggattcatgcaatgatccgcaccaaataccccttttattgattgtttttctttttcccaagaatgctattttggatgatttttaccttcttcaaaagtgcattaattttacctcactgagttataatttcagccaaaggcaaataaacttgatgtttttgtcagatattctattacaggaaaatgtccaacatccattagattttcagaattattggtggtagctatcaggcccctctgccaccttcccacaggggtccagggatctcagcttgagaaccctaagatagtgaatgaaaaaggttccttctcatcaaggtccacccaaccctttggtctgacacccaccagccaccccgccttaccagtgttatagaacacagtgttgatgaatgtgcagttgcggaaaaacgtgttgctggatgtgacatcctcaaaataacactcttcaaacagggaatcctcaaaggacactgacttgagccgcagcccaatgaacctgtaaggccaggatggtgaaagacactcccccgtcatcctcatgccccctccaagactcactctttagcgaagtaatgggaagctgggcattgagaagaaaccacaagtgtttgccccccaaatgtcttgtcttgaacccctagactcataaaagagacgaggtagaaggaacagggaagaagtgaagtttaaaagtccccacatacttgtcattgaagtactgcccgcctcggtggatctgattctccaacgtgaagttaaaagttacatgctctacgcgctccccggggaacactttggtgcgggatgcgtagtccactgcctggagatggcggatcatgtcaggaaaccagacggtcaggccatagtagctgaagagtcaaggacaatggaaacagacaacagggcttcagacaaggctcagagattagaatcaggcagaggagaaaacggaaatgtgtatcatctcagaacaagggagaaatggagtcaacctctgttaggaccttgctcctctccagcctcaccagcttctccctgctcctcccttcaacagttgctgcgctcctgggggacttcagggtctcgcacagcagccactatactttttcttacctcccaagcatttgcttttccctctgccaaaaacactcttctccaccccagccacccccactccacctgtctgactcccattcacctttgaggacttaggtccccaccccagcccaagccccaagtgctcccactgcccttcccccacccttctctcatcaccctgcttcatagcaagtttcgtctcacttcttttttttcttttgagacggagtctcgctctgtcacccaggctggagtgcagtggcgcgatctcgactcactgcaacctctgcctcccggattcacaccattctcctgcctcagcctccagagtagctgggactacaggcgcccaccaccatgcccggctaattttttgtatgttagtagagacggggtttcaccgtagccaggatggtctcgatctcctaacctcatgatccgcccgcctcgtcctcccaaagtgctgggattacgagcctcatcgtcctgcttcttaaccaaaacataaactccaggaggaccttggaccacatctgtttcatcccagcacagaatagaaactgaatcctggtcagcctacagtacaagtttgttgagtgaactagcgaagtagaggagctggctgcaggatcagagggggtctgcatggcaccttccctcatcgcttgtcccctgcatctccattctccccacctctctcccagcccacacaccaccacaaccaccacacatcacccagcccacccatctcctcacctgaatgacatggtgaaccacacacccatcatcatcagagtgatgcgccgatattcgggaccaaaacaggagagaaaattcccccaaacctacaggggaccagacaaagtcagaccttgactatactaagttctagcacccatagatccccacttttctgccctcccacctcccttcagctcacccatcacccacacacatagacttcagtcctgccttcttctccacttcccccactcccttctatctaccaccccgtccaccattacctgcccccctaggctcaaggcccggaccccccagcgctggtaccaggtccctgtgtccgactggatctcaatcaattcatcctcctgatgaatcgtcttaatgtgggttacctggggtcaagagaaggggtgggcagtcacacactctgtgtttcccaacatcggccaggcgcctcagtttcccctgcattagcaaaatgggaggcaggaggtggatatgataccctgaaaatctccttacggtagagtgtggtctgaggtggggggtactcagagaggggccaggtaggggctggggctgcagggcgtggaggtctgagtcgggagggctgtggcttactgagaacactcgctcaggatgtcctttggctcgcatgttggtatcatggacctgcttcagcaccatccaggcctcatcatgctttccattctagagccaaagacacaatccccacatccaagtcagcccctacctgacccagagttatagaccccctccctcccacctggcttctgtagtcacaggacactaaatggttcccagccctcaaccccaccaccaagccctgacctatgggcatgcactcaccactctgaaagagccccaagctgaggtatagcaagacaatcagacttgggcaagagctgcgggttgggggtggggagtgttgtccaggggaaaaaggcaagcacaggtcttgggaattccatagtacagaggaatgtaaaaaccaaaggtaagggaaatgatgggcaagcatgtagtcaaagacctaatcctgctggggttaggaggggaaggtatagggggtgggaatgtctcttgagctgtaaatgcaggacagggccaaggcccttccctgcaaaatcttaagtcatccatgggtgaagaggtcccctggtttctccacccaagaacccctcagggacacattccaaggcaaagaatgcaagataaagtcccctggagagtggactctgtgaggaaggcaggcagtcaaacaggatcaaatcaaactccagttggtgtttgaacacagaagcccctgctgccgtccacactccacagcccgcaccccaccccaccccatgcagctcagccccatcacctctaggaagaaacgggggctctcaggctgcgtggtcagagccccaatggcaaacacagaaggaaaggcgcagacgaggacgaagaccctccagctgtggaactggtaggcagaacccatctgaaaactccaccctggtagggagaaagtgacagcatcagcagagaggccagaggctgggggaacccaccacagggagcacagaagaagagggaggagggagataacctggggtggatttccgggggctgctcaccatagtgggggatgatggcccaggccatagcagctgcgtacacgccaccaatcatccaaaacatgcagagccagctcaaatgctcccctcgtttctcctgggccagaaactcggagaaataggagaagacaatggggatggaccctccaatcctgaagtgcatttcaagaattcagcattagcaaatggccatagtcctgatcccctgccccactgctctggaccccgagccccttttgtcttccaggcttttgaagagactccatctcacacataaagccttacaagctcccatgtgggccagccatcaagcacccatccttgggaccatgggaaacaggcaagcgagtctcagggaaagggaaagagcaaatcttaaatcttgaaaatgaattacagagttggaagggcgggaaagtaattgcagaaaagagaataaatctccagagaaaaaagacaagccaaaagcctccaagggcagatgttgtgggaatggccagaaaggagcttggagttgaagcagagtaagcgggcctgccatgcttgcaaaagtgaaggggcagtgcggacaaggcgtcagggttctggcaggtgtgggtgttagcaaggtttgttgtgtaatgcaggaaatgtgtagactctggtagggggtaactctgggtccacaggagcccaggggtggggctgaggcccactaggcctctttgtggaggcaggctcaaaaatggaactagaggtggggtggaggactcaggagtgggccaaggaacagcattctggacagcagcagacaggtcctgggcagggaggagctggcctgaagatggctgggggagaaaggaactcattcatccgttcaactcacacagatttaaggtgcatttggtgtgcctggcactgtgctgggccctaaagatacaacagtgaccaaggcacagtcctgccctcaagggacttaggaagtgtacactcacccaaccccagaaagtaggcggcagaagaggaaagtgccgtaaccctggacaaaagatgagaagaaggcgaagacgctgttgactgagagcgagatgagcagacactgcctccgacccagccggtcagccagacctccccagaggaaggctcccaccatcatgcccaggtagacgatgaggcctggaaggaggaggaaaacaggcagagggggtgtgagcagacacaccttaattctcccaggagatgagcactgagggagctgaaggatctgaaaaacttctagaaggtaagtctacccagagattagagcaagtgagagaaaatgaatggtgtaagcaaagatagaagatcatctctgcaggccaggggttcaaaggcaggaatgaagatatgggagaacctgcaaactctccactctcttcggtctgtctcatttctcactctgacacacacacagtgacacctttacccctggctcactttgaaggaggaatgggtgtgcctaggatcacagaccaccccagggtcctctctattctccctgctttgatccctcaaagcagcaggagagctctcatttgttcctggggaaaggggctccaattcatttcatcttcccaggaaatctcccacacaaaatccatcctttactccttccagtctcaatatttctggtccaaaaactctcctgtttttcactgccttcataaaaccaaagctggaattaatctttaaaatcatctactccaaactttgcattttcccatgcccaaaccaagccccaggaagaagagacctgtccaagaccccatggcaatttggtggcagagtaaggcctcgattctttctctgtgagtctacggggttcctcctcagagtccctgtcaggaaaggccatcaaagactacatcctgtcccctggaaactcccatctgagtgagagaaagtctaaccagcttctctggcagaagatccaggaccctccccccctcccccaaccaccccaaactgactctccccatttataccaaggagtttggatactggcttcttgttccccaatcagtgaaagggaacaggataaccagagggaaagctatgaagaaacattaaatggtagggaccatcctaccacagccacctcctgcagaatgaagcagaccaccacccaaccactggcccaagccccagtccagctgccctcccgcaagcccctctgtcacattcaacttcaccctgacccaaggccaagaagagggagtgtgtgagggaagagtgtgcagaggaaccctgagccctctgggaacatcttgggtgcagggtcctagggaacccagtggtaaggacaagagcaatttccaggagcaaggaggtttccagagtttgaggggataaggctggagccccccatgtcttacctagcatgcctttgttggagtcggacaggcacatgtctttctcagcgctgggcagcacgaagcccaccacaaagacctccacaccgtcagccatcagcgccagaccaagcacaaaatacagtgtccactggaagcggccgtggccacactcccgtaggatggcttcatactgttgggccagttcttctcgttctttccgtcgttgtgcctccccccggcccccagggggaccctccccatcactcaagcccccccttactccagccaggggcgccccatctgccatccgctcgcctttgcccccagactctgcccggggaatgccctgatattccccttcatagatctcatcatcctcgtcatggccctcagtagcatcactggatgcaccaccttcctcctcatcctgggtcccttctcctcggtaataaccatcactgggagcagggaagtcatcatcatcatcctcctcctcaaagcgggagtacgatcttcgggaatattcgtcctggactctgtccaggcccttcaccaccttcttggccgcatgctttttgacttccttagcaatgtctttggccccacggatgaaagctgcccggtctcggaagccctcttccatgatggggcttggggcacttcactgggtcttctccacctcctgcttctttttcagctttttgctcaaggacttgtagagtcaaaaagacccctccccacagttacttagatgaagcgtgttccagtatctctgggcacaaaaaaaagagcaaacaggtcctagccaatgagtgcctaggaaggaaaaggaaagagaggagctttgacctatacccagttcagttgggtggatggggaagggacagggggagcaggggaatgggaaggggaaggggagccagattgggaggctaagccaggataactcaggaagggtcgcctgcttctcttccacaagcctctggagacctagaaaaaataacagacagcaaaaggaagttgtgagtcctaaggtggtgaagaaggccagtataaagcctctcaacccagagccccatctggaccatgtggtgcagagatggtcttctcgctttaggctcccatccacacactaaaaagggatggctatctgggctaaccgggtcactcacatagaagtccccttactttgaccttggaggcctggcctgtggaatttgctccaaagtcgcagtcacctacccccaaacccaccccagcccttgctttatcaccaatctgcaaagaactaaacaggaaatatgagaaaccagaattcccttctttagtcttgcctgggtttcttactaggggtggagttgaggaggatgtgtaagaggacaagccctccaacctgtggccttccctcctctgatggcatctgaaggcaggggcttccactgtccttccctcaggtcccatgtttacaggcttcaacaaggagggattttctctcaacatagtctaatgggtaaatgctcagcttccagagtcacaaagacatggggttgacttcctgttttggcaaatactagctaagggaccaagcctcagtttcttcttgtttaaaaaggggaaagtaagggtcgaatgatataatgtatctatgctccttaccataagtcacctggcacataaaaatgatgaataaatattaattattaattttgtggtgacagtaatatagtgaaatgccctatactacctcataaggtccccagatgaaagctatcttggatgctctttagggtgagcagcaggaagggacactggcaaggagaatcctggttcagggcaaagcacatgactgttaggggtgacctaagttgaaatcccaactctgccacttactaactgatctcagtcagggtagttaacctccctaagcctcagtgtccatctattttaactggggataattaaattgggagactgtttcttggagttgatgtgagaatgtaatctcacagtagatactctatgttagttttcttccttcctatgatgttgaaagtgggaaagaaacaggaagcagcaagggacaacaggggggtcatacttagatgctgttgcccagcatccttgcaaacagagtcccaagacacccctatctatgtttcaactaattccagtagctgggcccacattaactacctccagaagaacaagggaagatccagaaaagggggacctggaacccaagtaaagtggaggaaagatggaaagctaagaaagaggtgatgactgtccactgccaccttgcttcagaatgtcatagataggccccctttccacagatgggggtgagaatggaaatgactgtcaaatgcatacatttccaacatgaggttctaaggcctacagttgcatcccatccctccagggcctcccttcctaatcccccttaatcctttctgctcctcctccaggagtcaaggaagaaggagtccacaaacaccgcattgcgtaggaggcggatgtagaataaagggggtttgggtgtccccccaaaaaagacattctccagaggaaggcatgggatagcccccttccttcataggagcagaggaagcaggcctagattctgatcagaaatcatccccctaaaaatatcctgcctccggtgctcccacccatccagggccttcattaaaacacacacacacacacacacacgcacacacacacacacgccctggtagaagacggtaagcaatgctatgtggttcagagagaagcactggcaagcagcgccttatcccctcaggacagatgtaagcagtggaccacggtgaccagaagcagtgacccctatgtcaccttttcttcatggttcagggcccaaccatcccccatgaaagagctggaactgcggaatcccctcagcgcatggcaatttgctagctttcctctctttcctaaccaggatctcccctccagccctgaaggaggcaggacccaccaggagccatactctatgtttgttgaccctatttccccctgagaggggcacgtagggcaggaaagccttccacaaccacagcaggatatgaggtctcaacagccagcttcctcagggccagcaagcccaggaggtcaggagagaaagaaagaagacaaattctttgagctggtgaggaagtggtgctatttttagcccccaaaacagcacagggtggctaagcctgggggagtgagacaagacttggagaggtggaggttaaaggagacaaggttcagggttacaaggtcctaggctggctgacttcacctgacaggaaaaaatgtgcccaggagattttctgcagagggtggagacaggcaggggactccagagcaaatgctttctttcagaacagctcatccagccctgggtccagaaccccccaccctcccagtcaaagcccctgactttggggtccacccagatccccaggccttcctagctcaggtgacaaggtcattaaaaagcaatcacttatcaaaacgtccgcgggggcgggggtagaatgtgggaggtgcgggagcaccccttccccatgacagcccggtcatcgaacttcagcccccacccaggaccatcaagactgcgcctcccctccccacatcctaccaaggttaggaagataggagcacccacagttctgagggataaaaatgagggtgtcagctgagaatgcacactgaggaatacggagaggcagagagggggacgcagggagagacctccgcatgcacagacatagagaccgcccctatcagcatttgcagcgacccccccacaccccatcttgcctcagctccggaataagggaaaagcccccagaactgactaaatccctgctctgagcacctcctccacccttggtcctgctgctagacaagtgtccaccttcactcaacatcccttccccccaccccggagcaactgccgccagcccccgccatccatgcccccaacacctggcggctctacatctctgtctccccagtatttccattcttcactccccttccctccatccttcacctgcccttcttcccctgccccccacccacccaagtccaggcgtgcacactgaggcagcatccattctccagccccagccaaggtcatttatcattcatcctgggggtggggggacgtcaaggtgaggaggggataggagtttgagggaacctcatcccacctcacaaccccaccaccacgttaatctccgaaggggatagtggggacttggttaaggtagagaaaaacacccctcctccccattcaccaatattatacatatgcgtgtgtgtgtgtgtgtcctgaagagcacaactgaaataaatgtccatccccaaaccaccaccaacccaccaacccccctcacccctagagaggggatcgtcaccctccccataagcaaagcatcggaggataaaatggctgcaaggcaaggcaaagatgcttctgccaggggcggggaggaggtgagcgactgagaaaggggtctcacctggtctaggttccccgggtaaggagtcccgggcgaggacgggggtcccggccgcgggcggaggcggcagcggcgactgctcccggcaccagggaag

SEQ ID NO: 12968 - DNA, 3900 bp, Homo sapiens
attttgatagatagttttattataaaaaattggctttttgattatggaagctaataaatcccaagatccccaagatcttcagggtaagttggcaagctggagacccaggagaactgatgatatagttccagtccaagttcaaaggcctgagaaccaatggtgtagttccagtccaaaggccgagtctaagacccagatggagccagtgtttacttctgagtctgaaggctgagaaaagccaatgtccgggtctcaaagcagtcaggcagaaggaagtctctcttactccggagtgggtcagtcttttgttctagtcaagctttcaactggttggatgggacccacctatattagggagggcaatttactcagtctccaattcaaatgttaatctcattcaaaatactctcacagaagcacccatatttggccaaatatctgagcaccaatcctctagaagttgggacattaaccatcacaggccgtgcgtggtggctcacgcctctaatcccagcactttgggaggctgaggtgggtggatcacctgaggtcaggagtttgagaccagcctggccaacatggtgaaacccccctctccactaaaaatacaaaaattagccaggcgccattgtccacgcctgtaatcccagctactcaggaggcggaggcacaacaatcacttgaacccaggagacagaggttgcagtaagccaagattgcatcactgcactccagcctgggcgacagagtgagactccatctcaaaaaaaaaaaaaagttaaccatcacaggtagagtttaataggctttatctctgaaacttagtctcaaacagtccagaaaataattatatatttgtagataggtacatacaaataaaacaaacagtgaattgttaatatttgggtaatctaggtatcaggataaaggatatacaggaattatttgaactgttttttttaactttagatgcacaaaccttgtaattatccttgacactttccctcccacaaccaagccattaccacaccctgtaggttttactttcctaatatacatcctgtagccacaatttctctccatttccaccaccaccaccaccaccttggtccaaatcatcatcatctctcacctagactgctacagtaacctcccaacttgtctccctgtttccactcttgcctcctctacaatccattctccaccctgaagccagtgatctttgcagaatacaaacttaaagtcagctaaatgcaatgcatgatccttgattggtttctgaaaattaaacatttataatgtttacttagactgtgctgctattacaaaataccactgactgggtaatttataaacagaaatgtattttctcacagttctggaggctgggaagtccaagattacggcactggcaggtttggtatctagtgaaggccagttcctcatagatacgccatcgaggtgaccttacatggcagaagggacagaaggggccaacttaccccctcaagctctttcaaaaggcgttagtccattcttgagggtggagccctcatagccttattacctcctaaaggccccaccacttaataccaacaccatggattaattttcaacatgaattctggaggagacatattcaaactatagtagacaccaatgagacagttggggaaatctgaatatcaactgtatgtgattatagtattgtatgaatgttaaatgtcttggatgtggtaatggtattgtggatatgtatgaaaatgtccttgttcttaggagatacacattgaaagtacatagcaattaagtgtaaagaattttgtggggccaggcgcagtggctcacgcctataatcccagcattttgggaggccgaggcggactgatgacctgagtcaagaccagcctgaccaacatggagaaaccccgtctccactaaaaacacaaaattagccagagtggtggcgcacgcctgtaatcccagctacatgggaggctgaggcaagcaaatcgcttgaacccaggaggcggaggttgctgtgagccaagatcgcaccattgcactccagcctaggcaacaagagcgaaactccatctcaaaaaaaaaaaaaagaattttgtggctgggtgcagtggctcacgcctgtaatcccatcactttgggaggctgaggcaggcagatcacttgaggtcaggagttccagagcaggaggatcacttgaggtcaggagttccagaccagcctggccaacatggtgaaaccccatctctactagaaatgcaaaaaaatttagccaggtatggtggcaccagcctgtagtcccagctactcaggaggctgaggcaggagaatcacttgaacccagaaggtggaggttgcagtgggccaagatggcgccactgcactccagtctgggcaacagagtgagactctgtttaaaaaaaaaaaaaaaaagaattttgggccaggcgcagtggctcacgcctgtaatccctgtaatcctgggtggccgaggagggtggatcacctgaggttgggagttccagaccagcctgatcaacatggagaaaccccgtctctactaaaaatacaaaattagccgggcatgttggcacatgcctgtaatcccagctaatcaggaggctgaggcaggagacttgcttgaacccaggaggcagaggttgcagtgagccaagatcacgccattgcactccagcctgggcaagaagagcaaaactccatctcaaaaaaaaataaataaataagatttctgcacctaactcaagtgattcagcagaaataattattattatttcattattattatacacacatacattaaaagagatacaaagccaagtctggcaaaatcttatcagtgaacctaggtgaagagtggataaatgggttgctcattgtattaatcttgcaaattttctggaagttttaattttttttaaaggctagggaaaacagtgtatgtcatagtttaaatttcttgagtgtgataaggttattgtggttatgtatgagaatatctttgttcttaggagatacatattggagtagttaggggtgaaatgtcatgctatctgcaacttactttcaaatggttcatccaaaaaagcatataaatatattttaaagtatatgtaaagtacttaaatatatgagtatatatgtacaagtataaaataaatataaatgcaaaaaatggtgggtcaagtgaaaggtagagggtgttgctttgaactattcaacttttctgtggctttgacatttttcaaaatgagaagttggggaaaaacatttagaaatatgtaaatatattaaggatacaaaataaaatttaaataattttacaagttaagaatcatcctggaaaaattacatcctgttacatccctgcttaaaacctcagtagcttcccactacttctaggataaagacaaaattgcctaacaagggctacaaggcctggggtggtctggcccgttcctctcctcctggtaccctactcatcaccatcagctgccccctaggctccaaccacacataaccacaccctaactacaccagaaggaaagactccctcaaaattctctctcctcctgtcctttacacatgcagctaccaaagccaaaacctcactatgagggactgagaaatggattctcatgttgtttctgctgaactgtttccctaaatctcggaaatattctctgcccgcctcccattccacctctccaaccccggccaagtctgggtaacttgcctccttagcatcctgtgtttatctcatcgtagcacctagtacccagtattgcaattgtccgctcacttgttagtcttcagtgctctgttgtctccttgaaaacagggcctgacttgactccc

SEQ ID NO: 12969 - DNA, 1093 bp, Homo sapiens
ctcttggaaaaaaattatgttagtcttctataattatagaaataataaatgttcacaatagaaaaattgggaattttagaaagagtagaaaaagaaatccctataatatccccacccaaaggcagttactattaaatttgggtatatttcctaccagcattttttctcatgcatgcatttcttttttacgtagctgtgatcatgaaaacaagataattcgtgtcctgtgttattcatttgacatattccataagtaagctccattatagaaagtaacttaaaatgatgttgtatgtttgtttttgtttgtttatgttttaataaagcatgtggattacttctataagacgaaagggaaaatgtagatcctatgcacaagtatttatttccctccaaaccccctttttataatatgtattgttgattttatagagtgacctgatcagtacatgtaggggctcaaatcacagctattctttaatacttcgggttacttcattgctattattgtttgttactaatatgtaagatgaggaaaagacaaccttttggtgggtgttgggactgggagggagggcattgaggacagatgaaccaaagctggatatggaaggaaacccaacttcataccaaaaaaaacaaaacaaaacagaaaaaagaaagaaaaaacccgtctagaggccagttgggaaaagaaggaagcagaaacaaacaataggatatgaggttcagatttctttaccaagaagacacagatctttcatgactgtagacaagaccgagagagaaacaaagcctccccaccccgaaagtcccctgaaaggaaaaacattgggaaaagggaactggtaggaaatgactggaagaaccaaagaaacagtcctcctaaacagaatgttaggtggtacgtaatacacggttttcaggatctccatttgtgggcatactgggagagtgcaggcctacatgtgctagtggtgagctggggggaaatggtgcagtcaataagtgctagtttggcaaacaaccagataatagaactaattaggttagtttctcttcttatattaaccaaaagttcttatattaacta

SEQ ID NO: 12970 - DNA, 312 bp, Homo sapiens
ggccgggcgcgggggctcacgcctgtaatcccagcactttgggaggccgaggcaggcggatcacgaggtcgggagatcgagaccatcctggctaacatggtgaaacccggtctctactaaaactacaaaaaaattagccaggcgtggtggtaggcgcctgtaatcccagctacttgggaggctgaggcaggagaatggcgtgaacccgggaggcagagcttgcagtgagccgagatcgcaccactgcactccagcctgggcaacagagcgagactccatctcaaaaaataaaaaaaataaaaaaataaaaaa

SEQ ID NO: 12971 - DNA, 21100 bp, Homo sapiens
ggcagctcctttagcggcagagttttccgagtgaccttcttgatgctggctgtttctctcaccgttcccctgcttggagccatgatgctgctggaatctcctatagatccacagcctctcaggtaggctgccccgcagtcctcaggaggggttgcttgacaaaatgtaataggctgaaataatttccaaggaaaggagggtgattaaatcaatctgatctgaaaggtaagttaggagaaatagagttttgtgatttctttagtacctgggtttttatgctgaattagatgttactcaggaaatatgcatggtattttccctgtcattgttttaaaaaaactgcatcaaccaaaaacaaaaattcaaaattagagaagcttaataatcattagacagtcaactataattcatttcaggtagcaaaaacacacacaaatggagcttcagttacctcatttaaattttgtaagtaactgattttctacaaaacccataattagtgttctttttttcctaagttacctttcaccgatagagatctatgagtaatgcagtccattataatttgaaaaaactattgtatatgtaaagccccctgaaatagattcatgtttataattatagtgggatagagccaggctctcatcagtgtgacgatctatgacttccatgttgacatagttgcaggagggttgtgcagtctggttcagtaatttcctggttccccttgcaactgctgatggggtgaagccatctgaagcttattttaaatgagttagtccaggtaaggctttaaaaacttcagacaagaattatacctagttaaagagtgaatataacatactagctgaataatgtagtgttttatccataaaaattaaggctttatattggatccgattcactaagaatgtagaggacacggttctgaccttagattgacatgtgtagctgagtgaactttttgttgttggatttagaatagtaaaggcacaaggtgctgtaaacacacaatttgctcatgtaagattgagaatgggtgaaggactggggactctagtccgctccaagagtgtcagctctgtaattcctggtgtgccagtgggtcttcagatggatttttctgcctgagccaggcctgaggacatcctgtctccaaaggaggggcgtcaggggtgggtggcgggggggggtcccctgatgtgttgagggaggggcttctctctttctaacccttctttacagagcaggatggctcattctagccaaagggaaactgacctgggccttcttagatagtccagttggctaaggtgggggagtgaactgtgtccacagctggggattagaagcttgggttggggggctggccttggaaaaggaggctgaggttgagttttgagttggagagagaggttggagcctcagtgattgaagacctttgatctcaggaaagatgattttatgtgtggaaagagtggtgaagaaatgcattgggaaatggggtatgtggccctggccagacactgaaaggaagcagagcctactggggattggaagttgtttgtacaaagtgagttctatctgttgagtagaaaagcctgatgaggaaggaaaggaagagaagcagtggaaccgctgcagccaacagggacctctctcctgggctcagctttcggaatggcagtggaaccatcacagccaacagggacctctctcctgggctcagctttcggaatggcagtggaaccatcacagccaacagggacctctctcctgggctcagcttttggaatggcagtggaactgtcacagccaacgggtctctctctctctcctgggctcagctttcagaatggcagtggaaccatcacagccaacagggacctctctcctgggctcagcttatggcattggaatcacagccaacaggggcctctctcctgggctctgcttttggcatggcacactcaaaaacaggaagataggccccaaaatgcagagcagaagcagaagcctggtacatgacagagcttggtgtgtctcatgcaagaacgtggccacaacacaggccatgccccatgcacgccatcccagcgggtgctgactcagctgcagccctctcagcccacagtcactctgtggaaggacatggtttctctccagaagggaacaaaaagtttatttttcatagaaggatatgaatgtttctagtcactgaaaaaatatcagttaaagtcaaatttatggtaaaaaaaaatagagcagcattttggagaatggatttggttgctataattttaaagaccaacagaaagagtaattctactgggagttgaaagttgcagtactgttagaagtacacattttactatcgggtgaaactgtcaaactgagagatattaaaaaatagcaacaacctttatgggtggtctgggacatcaagagcaaatagaagcactgtataaaactcaggcagggccaacaggagacccgctggggagggagagagcagtgccccacaccctggcttcctgtgttagggagagagatgtgggggacctcagagagctggttctcagaagtgcttaggaaaacctttgtgcagtctgtgggtcacagtgggtcacttctctgcagttgagtattactgcattagtgcaggctttcttcacttgtgccagccatccgtgatcatacagatgccctgttactctgttcacatctccccacgttgtcacagggatcttgaaaactactctgtacatgctataggaatcaggatgtcatatatgctgtgtctatgacagccctctaatcttcccagaaagaagggaaagtgactttgcagggcaggtttttggcaaagccctgcagccttcctggtgattttgttctcaagtactgaaaccagctgtgtaatagtccagactggaagagcgaccatccttctctttgtccctccatactcctggtctgcctgttctctgattttttagagatttctaagtgtggtctaagctctcacgggagtgatgtagtatcctgggtagactcccaaacacccgtccatcagctgagtggccgtttctgccccgtctgctggcctgatcctcttgaccatggtggccctgcgctgcctggcgtgtagaggtgatggaggccgagcgaagctggcagctctgcttgtcatcgtggcatggcctcttgaccatggtgaccccacactgcccggtgtgtagaagtgaccgaggccgagcgaagctggtaggtctgcttttgtcattgtggcatggcctcttgaccatggtgacgccacgctgcccagtgtgtagaggtgacagaggctgagcgaagctggtaggtctgcttttgtcatggtagcatggcctcttgactgtggtggccctgcactgcccggcgcgtagaggtgaccgaggccaagcgaagctggtaggtctgcttttgtcatcgtggcatagcctcttgaccatggtggccccgcgctgcccagcgtgtagaggtgaccgaggccgagcatggcctcttgactatggtgaccccatgctgcccggcgtgttgaggtgaccgaggccgagcgaagctggcagctctgcttgtcatcgtagcatggcaccaattgccccaggtggggtttcccttccttcctcttttgctgtgaagagagctttaaagaagctctttttgctgttgtcataaacttttccccaacgcttagctccttcctgttcttgaattctctgccttgctggaggcaggggacaggggataatcggaagatattcctctctactttggtttcctccagcagtgctcgttgggagccttctgtgtgccatgttgggtgccagatgctgggaatacagtagagaaaaacacagaaagaaatccctgatctcatggagcgtatgttctagtggggacaaacagaccataaacataacagaagcagatcacacagtgcatgagaagctggtgtgtgctatgaggagcatggagtagggcaggggcctgggttcgggggaggtatcggatatttagttgggtggtcagagtgggcctcctgggtgggggatggttgctgttccaagtggagcaaagagctggtgtgaaggccctggatagggagatgctggtgtggttaggacccagcagggaggggctggtgtgagggatgcagaaggcacaagggagagagggggcaagaaggtgctgtggccaggttgcggtgctcagaggctgctgccaggacttggctctaggtgagagggggccattgtggggctctgaatagaggaaggtcatgatccggcatggctgctggattgagaatagactacaggggtcaagggagggagcaggggcgaggcgagaggatggtggccccagccagggttgtaaggaggacatggggagacgggttcaatggtgtcttttcaaagtggcctcagcagaacttgatggtgggttgggaggcgtgacatactggcatgtggatgggaaggacgagtagaggcaggagtttctggagccgtgtctgtgagtagaagggctccagggcccagctcaggctcctgcttcaggaagagcctggtgggcctcgagaatatcagcgggaggtggcgtgccctgtgctggaccatgggacggtggctccagtcccaggaaggtctccccttgctccttccatcttctctgtgaaatacgaggccgggtcatcaggtgtgaaacgtgggcactgccccccaccaccctaggtagactccagtggctgtagggctgtgagtcacaggggtgaggaggtccagctgccctgaggcattggatgggggtggggagctggggaggctggaggatgggtgggcacaggcctcaggatgctctcaggtgacaagattgctgaaggtcttgcactagcacatttatatttttatatttcttttgtaccatgatgttttctgatatcctagaacagttttttcttaacccttgtatttctggcaactgaggatgttgttagaaagtgccatctttatcaaagaactgagagcaggtgctcggtacacattttcttcacatgtgtatttatagacagatctctggaattgcattattttgcagcttcaaagaacccccgctcttgcttggtgttctgcatccaaatacgaagctgcgacaggcagaaaggctgtttgaaaatcaacttgttggaccggagtccatagcacatattgggggtaagtctaagcttgggtggggggggagccttccaggctgtctgttgtctgagggggcgggttctgtgggagcagctgcagtggcacgctgcccctggactggggccctgcacatccttcttagctgcggacgtgggacttggccctcagacatcacatgggaggccctagtggctctttctgctggtctcatctgcccagtttgcatgccattttagcactgggtgattttgaattcatctctatggaacactttgttgtgctcaaagtgttgtgaaaggaaaaaggccaaatacagatactgatttttagttcatttatcaaagttaaatagctatttgacagcacagtatttcttagttccatttgctttgtatagatttcactgtgatgaagacaaatggttctcaatatttccactgtttttgtctgactgtttgaaatctcaccttgatgggtacacttaagggtaaccatctgcatcacacttgcccatgcctcagaactagaattgggtctggttctaatacttgcatctctagcaaccttgaacaaggcattttctgtttgttaaaatgagaattaagtttagtattgggaaggcacagatagtcacagatagtttaaaacttaatctggtatgggcttgctgagcagcttctttggaagtgccgcttgttattctgaagcacactgttctccaggcagtgggtggctgtggatatgtgcacacagggtgcttctgttgtgctctcaaggccggtcagtggcctctcttctagtgacgtttgaccagcttctcttgcctgggccctgttatttgacacaggccccaaggactggtccatttctgcagttggtttgttttcttggctgtcaaagtcaaaattgtttcaagaagagtaaatatcatgatagaactttgtatttctcttaaaaagacattggcatttatttgtgtaaattttaaaagctttagctttttttggtgaaaaatcaaatcttgctctttaaaactgaaacttaacagcagttgaagtgcaaaccaatgatcttacctcccaaagagagcactttcctgtctttttctttttcactgggttacttctcattgtactttgtcaccaggtcccagctttttctctttctttgatgagctggtgacatttcttggccaggcacagtggggtcctctctggtgggtgtgagccgcagggacctgccactgctgtctctgccacctcatttggaagctgtcctgggggctggctggcaggttgctgacagtggaaggaggtactagctctggggagtgctgggagagagtaaccaccaactatagcaggctttattttatttgtttttaagtagactttatttttaagagcagttttaggttcacagcaaaattgagcagaaggtacagagattttctgaaaaagagtttttattacgattgggtgttgcatttcgtcaaatactttttctgcacacatgccatgcacagcctcccacatgatcaacatcccccaccacaagggtaagtttgttacaagtgatgtactcacatcaatacgtcaatagtactcggagtctgtagtttacggtagggttcactcttggttttatacattctatgggtttggacaaatgccatgtatccactgttatggtatcttacagggtgttttcactgccctgaaaatcctctttgctctgcctgttcattccacccttttcttttaacccatggcaaccactgatctttttgccatctccatagttttgccttttccagaatgttatgtagctggactcatacagtatgtagccttttcagattggcatctttcacttagtagtatgcatttatttaaaattcctccatgtctttccatgggttgatagctcatttctttttagcactgagtaatattccattgtatggatgtgccacagtttagttacctactgaagtacatcttggttgctgctaagttttggcagttatgaataaggctggtataaacatctgtgggcaggtttttgtgtggacctaagttttcagctcatttgggtaaataccgaaaagcataattgctggattgtatggtaagagttaagttttgtaagaaaccaccaagcgtttccaaagtggctgtaccatttgccttcccattaacaattagtgagagttcctgatgctccatgtcctcgccagcatttggtggtgtcagtgttttggattttggcccttttaataggtgtatagtggtgtctcgttgttttaatttgcatttctctgatgatatttgatgtggaatatcttcatatgcctacctgccatctgtatatcttcttggtgatgtgtctgttcaggccttttgcccatttttgtaattgggttgttcattttcttattgttgagttttaagagttgtttgtgtattttggataatagttctttatcagacatgttgtttgccaatattttctccagtctgtggcttctcattcttttgacagtatcttctgtagagcaagagtttttaattttaatgaagtttcacttattaattatttcttcatgtatctcaccttggttttatatctaaaaattcatcatcataccctaggtgttatatctaaaaattcatcatcatacctagattttctcctatgttctaggaatttgttttgtattttatatttaggtctatgatccattttgaattccatttttgtgaagggtataaggtttgtgtctagatttatttgtttgcatgtggatgcaaacaaatttgttccagcaccatttgtggaaaacactgtcttttctccattatgcattgcctttactcctttgtcaaaagatcagttgattgtatttatgtgggtctgtctctgggctaaaaattttatctgttctattgatttatttttctattcttttgctaataccacattgtcttgattactgtagctttatagagaatcttgaagttgagtagtttcagtcctctgactttattcttttccttcaatattgtattggatattttgagtcttcgccctctccatatgaactttaggattcatttgtctgtatctacaaaataacttgctgggattttgattgggattgcattgaatctatagattaaggttgggaaaaactgacatcttgacaatattgagtattcctgtccatgaacatggaatatctctccatttatttagttctttgatttctttcatcagaatattctagttttcctcatatagacctcgtgtatattatattatatttatacctaagtatgccaatcttttggatgctaatgtacatagtattgtgttttcaattccaaattccatttgttcattgttagtataaaggaaggtgagtcaatatcttgcaatatcctgcaaccatgctataattgcttggttccaggagggttttttgttgttgttgattctttcagattttctatctagacaattatgtcacttgcaaacaaagaaagttttatttctttcttctcaatctgtataccttttgtttccttttcatgtcttactgcattagctaggtcttcaagtatgatactgaaaaggagtggtgataggggcatctttgccttgttcttgatcttagcaggaaagcttctagtttgtcatccataagtatgatgttatatgtagatttttttatagatattcttgatcaagttaagaaagtttcccctctactcccagcttgctgagagtttttaatcatgaatgggtgttggatgttactagatgtttttttctgtatctgttgatatgatcatgtgattattcttgtttagattgttgaagtctctaactgtgatagtggattctgtttctccttgcagtttcatcagtttttgcctcacatattggtgctctattgtgaagcatatacacattaaaggttcttatgtttttttgaggcattgacccctttgtcattgtgtgatgctcctctttatccctgataactttccttggtctgaagtgttctctgtctgaatttaatacagctattctgggttgcttttggttagtgttaacatgatgtactttcttcatcccttcacttttaatctatatatgtctttatatttaaagtgggtttcttgtacacaacatagagttgggtcttgttttttgaataattctggcaatgtctctctttcagttggtatatttagaccatttatgtttaaagtgattattgatatattggattaatatctaccgtatttgttactgttttctattctttgcccttattctttgtttctatttttgcattctactctctttttgtcttttgtagttttaaactgagtattttatatgattccattttctctcctttcttagcatatcagttatacttcttttttttactttttgtagtggttacccttgagtttgcaatatacatttgaaaactatggaatgttttatgaatttgtgtatcatcattgctcaaggggcatgctagtagtcttctctgtatcattctaattttagtatatgtgctgctgaagtaagcacttaatgtgctgtaattttcttctaaaggatttctggcagttcttctcctttagttggatataatcaatatcagcagcagacactgatgtgaggtgaatatgaactcatgcccctaagtgctgagtgtcagcttgagtgcttcaggactggagaaaatcctcacagttctcatcactgactggtatctgctgcacccttgcttttgagtcaggttcatgcccacaggctgcttccctaggcccccgcagttttatcactgtaagttttaaggatttttcatattcccagaaattgcttctcttccatcttgagaattggcatttcctctatagggcagggggaacatgtaaacaagccctcttgtaggagaaggcggcttagtcacatttcttaggctaacattgctcttcctcctttttgtgtttttaaacagatgtgatgtttactgggacagcagatggccgggtcgtaaaacttgaaaatggtgaaatagagaccattgcccggtttggttcgggcccttgcagtaagttggtgataatccctcgatgtgtctcttccagtctttcagaaagatgttggatcgttgtgtggaactgcttttccctagaatgcctgtgggagaaaaagaacctctgaccatctagtagatggaacatgacgtcactacgagctcttcatttgccgggtggtccttgggcctcacggtgcctgatggtcacctacagtccccattttgcagctgggtagtggctgtggcccctgcttggtactgcatgggcctcgcccctcaccattttattggggtccccgtttacctttgcggtacttcagaggctaataggtgttatcacagtgctgctgtggaaaagtaggtggccttgtcattacttggatgtgtaagtgttattctgccttggtctcaggaatttcagccctgtaagtgagaatacccttaagtcattcaaattttggaaaactagagtagaagactcactgtttaaaactgatagtctatagacttaatagttatcattttttaatagctggaatgtttttattaaagtgatgtattttcataaacacaaacaacacaaaggtacaaaggagaaaataaaaatcacctgagtcttttcagatgtaattgttatgaacattttagtggttcacttttcagacatctttttgttcatggacatgcacacccacacgtatgatggaattataccctacatcagttctttaacctgcctttttccgtgccattttggcagtaagcaccctgcagtgagcatcccacagtgaacaccctgcaataagcatttgcagtgagcacccatggtcagcacctacaatagcacctggagtgatcacccatggtgagcaccctacagtaagcacctgcagtgagcaccccacagtgaacaccctgcagtaagcacctacagtgagcacctatagtgaacacctgcagtggtacttgcaatgagcaccctacagttaatgacccacaaaagcacctgtagtgagcaccctgcaataagcacctgtagtgagcaccccacagtgaacaccctgcaataagcacctgtagtgagcaccttcagtgaggaccccacagtgaacaccttgcaataagcatctgcagtgaacaccccacagtgaactccctgcagtaagcccctgcggtgagcaccccacagtgaccaccctgcaataacaccctgcaataagcgcctgcagtgagcactccacttgaacaccctgcagtaagcacctgcagtgagtacctcacagtgaacaccctgcaataagcacctgcagtgagcaccccacagtgaacatcttgcaataagcccctgtggtgagcaccccacagtgaacaccctgcaataacaccctgcaataagcacctgcagtgagcactccacttgaacaccctgcagtaagcacctgcagtgagtacctcacagtgaacaccctgcaataagcacctgcagtgagcaccccacagtgaacaccttgcaataagcacctgcaatgagcaccccacagtgaacaccctgcaataaccacctgcagtgagcaccccacagtgaacaccctacaataagcacctgcagtgagcactctacacaaacaccctgcagtaagcacctgtagtgagcaccccacagtgaacaccctgcagtaagcacctgcagtgagcaccctgcaataagcacctgcagtgagtaccccacagtgaacaccctgcaataagcacctgcagtgagcacctcacagtgaacaccctgcaataagcaactgtagtgagcaccctgcaataagcacctgcagtgaacaccccacagtgaacaccctgcagtaagcacctacagtaagcaccctgcagtgagcaccccacaatgaacaccttgcaataagcacctgcagtgagcacctgcagggcagttgtagctctaatgccatggtcttgtcttgttctgtacagcatgatgtatgggaagggatggatgagatgcttggatactgagaacagcacatgtagaatccgggaccagctaccaatccccatctgtttgtttttctagaaacccgagatgatgagcctgtgtgtgggagacccctgggtatccgtgcagggcccaatgggactctctttgtggccgatgcatacaagggactatttgaagtaaatccctggaaacgtatgtgacaatatctcgtttccttctatgaagattttagatcttttaaacaatatatgtatgtgtagacttaataggatttgttagcaacagtctactaaagactctgatatttcttattcactgaacagtactgaaaacattgcctgcaaaagtcagctagttttaaacaccagaaaactccctacccatgattccatttggtccgtatcctaatttcctcctagtatttatattttagccacagggtctcaaaaggacttattttgaggaagttagacctctttctgtcttgatttttctgtgtgtctctctgcgtcttgtctatttgttttctctctttcttctctgtggccctcccctttgtctcttcctttctgttttctcctgtagttcctcctcttctctcccctgattgctcatgagtccccttgatcaggctgtaatacgtgctgtgtgtctcagtggaggttcctgctggggaggagtccgttgtcttgtgcgtgggggcccgaacataggccctgcagcccagctgcttgggggcattccactctgctggccaccagctgtgactgcaggtcccttagttgctctctgcccagcttcctcatcaaattggggtcatagtagccctgcctgtgggattgttgcgagggtttaaaggcgatcacacctcgagagtgcttagcactcaatccatgttctttctattatttttcaaaacttactactacttttcttttctaaaaggagatgagtagaatgtcatatttctctcaaatagaactaacaaatagaactgaagcctgcctaacacttgcagtagatgttatcaagtcagttggccttagtaaaagaaggaattcctcatccttatagaaaagattctgcctttaatgaaattagtctaaaaaaatcatttaacacctaatactgtttttactataagaaggaataaatcttctgacaaatgacatggagaagtttcagtttttctttttaaatcagttaggttggttaatattttgcaattattgagaagttcctagttcaagtcaatctttttctttctttttaaacttcaggtgaagtgaaactgctgctgtcctccgagacacccattgaggggaagaacatgtcctttgtgaatgatcttacagtcactcaggatgggaggaagatttatttcaccgattctagcagcaaatggcaaagacgagactacctgcttctggtgatggagggcacagatgacgggcggtgaggccttgctccaggtctcccatttgttgagttcaccagccaggccagttgcttcagcagagcctgttacttctagggaccaagggagtatttccagcatcatatttcagcttctaggacaggaccttagtggcttctggaggcaggtgatggatgtcacaaaatggaacaaggtgctttcgttttctctgaggaaataaaacaggccagtccgtctgagggtgcaagtctaggcagtcgagagagaccccggagccaggcctgggctttgggttgcctctctgaggggtattcctgtccagctcccaggtgagcaagataactgaccttggggttccctggaggggacactggatctgctgtggatggggaagggcccccaggggccagcctcgaatcaagtttgagcagggcacccagggcctgttgctccggggtgaggcggagtcaccttcttcaggcccataccctgaaggcccagagtgggagccagggattctcccccataaccctctgcttttggtgttccacagcctgctggagtatgatactgtgaccagggaagtaaaagttttattggaccagctgcggttcccgaatggagtccagctgtctcctgcagaagactttgtcctggtggcagaaacaaccatggccaggatacgaaggtgtgtgtgggattagctgagccatcagttactggccagagcgcatcatggccggggtggggtgggcatggaaatgggatcgacagaaatcagaggcagcagcgcaccttctgcatggcatgttaaagaaaattcaagggtgcgctttctttctcccattgcgagtcgcagtccggaagagtgtcttaaggctgactggtgcagcccgggccccattcccctgctggcagggccttggtcctcccctgacctacttcccctctgttcatactgggccctgtgcacaaaggtttcttctcagcagctgagcctttgttcatgatggtcatagagcactttccatatatatatttggaccaagaccagtttggtgcttggctaaaattttttttctgaaattgaggggctatggttcactctctgcttgggtgaatttttcagagtctacgtttctggcctgatgaagggcggggctgatctgtttgtggagaacatgcctggatttccagacaacatccggcccagcagctctggggggtactgggtgggcatgtcgaccatccgccctaaccctgggttttccatgctggatttcttatctgagagaccctggattaaaaggatgatttttaaggtaactgtgaaaactgttattccaagaaagaaaatggaaatgaattgaatcatatttttttgacccttatagcttaaaaatctagttctgcttgtagtatttggctctgaatgacacttagaaacacatttcattcttcatcctgaaatgcagatttaaacatttggaccctttggttcttatggttttcctttttctgggtgtttttattgtcaccctcaccatcgtggctttgggcatctgcctgcctgtcagtctctggttccctgtttctgggtgttttgattgccaccctcaccatcgtggctctgggcatctgcgtgcctgtcagtcttgctcctccatctgccatggctttgccaggccttctgtgctctccacccccctctctgcctcctcagggaaagagtcggcaggtgccctttcctcccctccctgcaggtgtggccacccctgtaacctagtcaccacagctgccatcccgcctgctccctgctgccttcttgcagcctcactgccaggcactcttctctatggagttctgccctttgacctcttaccacacccaaatctttccctttttaaaaaaaagtcacccacccccaccaatggccagccatggccccttcaacacaacagccccttcaacacagcctttaaatcttgccattttcccagtggcttccatgaagcaccccacataataactcagcacgtttacactgtggaggggtcacttgctgatgtgggcacttgtgtaatacagagatctgcttttccagcaagctccgtgtcacaggctgaataggtattttaaattgatactgaatatttgaaccgatatggaaatactagcttatggtcctggggctgacaggcagcagttgctgagtcctgttgctgggctgtgtgtctggacccctcctgggggctgcgtgcacattctcagttagactggctcacggccttcagtgatgtgagttctgtgggtcgctgtgtgggaagtcctaatctgttgagaaatctgtccttctctttgccttattggctccagagacagcatctgttcctgctgggacctagggggaggcaaaatggcaggtgggctagcacaggggttttggaggctgccagaccagctgtgggatcctgggccggggacttggactcgctgcctcaggtgctctgtctgtaaagtggaaagaataatagtgcctcatcaggtgctgggaacatttagtgagaatctgcacatagtgcccttagcgtagggtagtatgagtggtggttgtgtctcttcccctgaatagaatgtgcataccatcagagcaggtgtttttctgtttagttcatgcatagttcatttgtcatcctccacacctgcaacagtgcctggcacatgtaggtgcgaggacgtaccgttgattgagggcacagttagggagggggctgcaagcatgagggaacatggagtcttcctgcagctgggtgaggaggggtgagagggaggaccacagccccatggacttggaaagaaggttcagttttattcaaaatgtaatccaagtcattgaagatttttttgttttttgtttttgagacggagcctcgccctgtcacccaggatggagtgcagtggcgtgatctcggctcactgcaacctctgcctcctgggctcaagtgattctcctgcctcagcctcctgactagctgggactacaggtgtgtaccaccacgcttggctaattttttgtatttttaatagagacgagttttcaccatgttggccaggctggtctcgaacgcctgacctcaagtaatccacccgtctcagcctcccaaagttctgggattacaagcgtgagccaccatgcccggcctgatttttttctttttttaatttcgaggcagtatcaaagctgtggaaagagggagggtacaagggatttttttcccagcactgtttccgagttagcggctggcctaatgccctgtcactcactgcagatgcctgagcatgtgtttggcacattctccttcattaccactgagtgaaaccaggagatgcccacagctcccctgtgactgtccggtctgcaggccccattcagattttgccagttgtcccggtgttgtcctttataacaaatgattcaacccaggatcaggagtggtgtttagttgtcagctgtttaatctccttcagtctgggggatattcagctcctgtctttttttgaatttttggccttgatcctttgaaagcgtacaggtcagctgtgtcccagaatgtccctccagtagggtttgtttttcatatttagattctgctctcgcatcgttggcagcagtggcgcagcagtgaagctgtgctcatcttggcgcggctgtcatgagggcgcgataccagtttgctctgttggggtggtggcaactttggccacctgattcaggcagggaatgccaggtgtctccacctggacgtggttctttcatgtctaattactgagttgctcgcagagaggtggtttttgtaagtaatcaccagtgccatcttatggtttcccatgttcttaatggtgattatgttacagtcatcattgattttgatgctcaaattacccatctgtggccaggaggagccccttcagtgtggcttctgggcctttgggcatgtcctcttgtcttgggctagctcctcactttccagcacataagtcgttccagtttcctcttgtattgtccctgcttcagctctgcaatcggccatttctcccaggagccctggttccttgtggaggagatctgggtgctgagtgtactcgctgctttgggtgtcgctgctcccaggtccctaagggacaacgctgggagtacaagcacacgatgcatactcacatatacctgcacgcgtagacatcacacacacacaccactcacgcttatgcctgcatctgtcatctgtaaattgaaaaccatgacaacaccacaggactgatccaagttttctccccttatttttccccctatttgtacctctccaacagtgagaaacctggatcccattgtcctccctaggtttacctgttcaaccattttctgtgcatgtgaccaatctgtggttgctgtgccctgtcacatggccccatccagggctgtagcaccccatgctgggctgtccccttcctccctgaccatgtgctggaggctgcctttcgcctcaagggctgtgatccctgcaccgggctgtccctgggtgtacacctcctcacttgcatgggctctcacagcctgatctgggcctcactgtggggacacctcctcaccccgtgtgggccctgacagcccgtgccaggccactcccctgcagggacacctcctcacccaagcggagtgggcttgtctgggtcaccatggtctgccatcccctgcacacatgtaccctgctcagccccatgctcctgatggagttgtttaggaggggagtgatgtagtacaaagaatgtttttaaagagaactgcagctactgcaaggagaacagcttgcagcagggctcagctggctgtgggagcctgtgtggaagctgtctcagtgactggggagaggcggcagggcagggcccaggccagggacacacacaacagatggcaagactggcagctgggcttgtagggcacagagagactgggatcaagggaaggctggggtcctggccctgtctccagagctggggaggctgttgaatttgaagtgctattagaaaggccaggcagacatgggtcccagacagtgagaaacttagcactggtgttggagatggcgatttgagagctttctgggaaagtgactagttgtaatagtgagagaggatgagatctcttagggggaagagagaagagaggagagtgggaaggatccacggccgaacagcaggagatggcatttcctaggtagtgggaagccttgggaattttttgagctgtaatgcagttgatctatcgctgttgaacctagagtctagtcagcttgtctgtctgcttgaacatttccagtgactgggagacattattcgttggacacttgtttgggtattttcccttgtattaaaagctagaaatctgtctgttaatttccattccttggtcttaggcagtggagtgctttgtcataatttccgaccaggtgtccttctgctctgccagaaatcacgcctctcgccatctgttctctgcttaatactcttcaacagtcccgtgtgaccacagagtccaggtctaagctcttttgcctccgtccctgtaggcgtccctcaggatctgcacgccccgctttgaggaaagcagtgggattttgctttttgttttggaagccatgttgtgtggtctgtggacctgcttgctttttttgaatgtgagctgctctcaaatctccatcatttgcaccttgcctatttgaaatgttttaaatctaaacagaagacttgtgtattccagggaagctgcgctggttgtgatctggtgagtggaggtcattctgagccttggctgcagtgctgtgaccacgtcggatgtgatatgtctctctcagttcagccaggccatccagagatgtgcttgcgttgctgtccttgtgctggggagcctctttggcctgatcttcacagggacaggggtggggtggggcctgctttggggcccctgggctgggagtgggagctggattagctgtcctgtggggcactgccctgtggggctgccctgtcatgggaaggagtcagaccgttcctggatggtgggggcggcacggttgatctgcgcacagtgttcttggccagctggtgaactttccctgcactgtgcttccctctagctctttagtcaagagacggtgatgaagtttgtgccgcggtacagcctcgtcctagaactcagcgacagcggtgccttccggagaagcctgcatgatcccgatgggctggtggccacctacatcagcgaggtgcacgaacacgatgggcacctgtacctgggctctttcaggtcccccttcctctgcagactcagcctccaggctgtttagccctcccagatagctgcccctgccacgcaggccaggagtcttcacactcaggcaccaggcctggtccaggaggagctgtggacacagtcgtggttcaagtgtccacatgcacctgttagtccctgagaggtggtgggaatggctgcttcattcctcgaggatgcccgggccccacctgggcttgtctttctgtttagagggaagtgtaacatatctgccatgaggaacataaattcatgtaaagccattttctcttaaacaaaacaaaactttctaagtacagtcattctctaggatttgggaagctccttgcacttggaacagggctcaggtgggtggagcagtaaggcactacccagagagcttgctgctgcggccctgtcctgcggcctcaaagttcttctttactatatataacgtgcggtcatacctttcttcgttgtggtggggatggaagagcagagggagcatggcccaggggtgttgaggccagcggtgagagccgtgttagccaagacatggaactgtgttctcaagggttatgtggggcgtgggctctccatagtgtgtatgaaaagcttgttgactctagcggctcagagaggactttgctgggtttctttctgtgaatatctccgtgctgaccatgctggaattggatgattctgcaattcgggacctactgcaggggtccgtttagtaacgtcttgtctgtgatctttgttcttgacctctagaccccaagatgtgaacagtgcacgtgttaatgtcatctttgctcatgtgttataagccccaagttgctgtatattttcacaagtatgtctacacactggtcatgattttgataataaataacgataaatcgacttctgctgattaaccttt

SEQ ID NO: 12972 - DNA, 895 bp, Homo sapiens
taatggagaaaagagaagctttctcattaaggtaaggaacaagacaaggatgtcccctctcaccactttttttcaacattatacaggaagtcctagctaatgttataagacaaagaaaagaaaaggtataaagattgggaaggaagaaataaaaatgtctgtttacagaggacatgataatatacgtagaaaatccaaaagaattgacaacaaaactcctgaaagtttttttagtccttattagtcaattagcaaggttgaaggatacaaggttaatacacaaaagccaatcacttttctatatggcatcaacaaatgaaactagaagttaaaaacacattgccatttacattagcacctaaaagaatgaatacttatatatatatacacatatatatggacctatatacttatagctataaagctaacaaaacatgcaatatctgtgcaaggaaaactacaaaaatccgatgaaagaaataaaaaacaaatgagagataatccacattcatggataggaaggctcaatattgtcaagatgtcagtttttttcccaacttgatctatagattcaacacaatcccaatcaaaatccaaacaagttgttttgtggatgttttagtccatttttgcatcactataaaggaatatctgaggctgggtaatttataaagaaaaaaaggtttaattggctcacagtcctgcaggctgtactggaagcatggtgccggcatctgcctggcttctggtgaggcctcagggagcttttactcatggcagacaatgaagtgggagcaggtacctcacatggcaagagcagaagcaagagagtgagggaggaggtgccacacacttttaaacagccagatctcgtgagagctcactcattattgca

SEQ ID NO: 12973 - DNA, 380 bp, Homo sapiens
agttataatgttgaaaaatgaaatatcaaattgtcaaaaatataaatagaaggaaaaatactgaagacaattaactagctttctaaaaattatttttgaattagtgatttttgagtgagatgggggtctcacttcatcacctaggctggtctcaaaccactgggctcaactgatttttccacctcagcttcccatagttctcggactatagaggtgagcaaccattcctggcggagaaagcatttcttatttctgaacagacatttatgtgctccatggtagtaaatgcatagattttatttatcctcacaacaacaataaaaggagcaagaacagttatggaaaattttagccagaaaatatatctcaaaatcttctag

SEQ ID NO: 12974 - DNA, 227 bp, Homo sapiens
gaagaggcaaaagccccataatagcctacacaatattgaaggagaaaaacaaagaggactcacaccatccaacttcaagacttactgtaaagctacagcaatcaagccagtgtggtgttggtgaaagaaagacaaaccagattaatgaactagattagagagcccagaaatagactcacataaatatagtcaagtgaccttttgtcaaaggagcaaaaataatagaa

SEQ ID NO: 12975 - DNA, 4371 bp, Homo sapiens
gtcgcgtggagctgccgggcgagcaccgttagggcagcctggcgcgcggcgcccgccaggcgcccagtcctctgccatcgcccacgcctccctggtgccagggaacaggtatcagcgcgcctccccagcggctgggagagacgctgaatgaagaagagggaaggacggttagtcaggtgagccgcggcggggtgggcggccggggcggccacgccctgccgagggagaagagccggtcgtgtgcggagggacagggtgaagggatcccacttcggggaggatgggcttatcccggcgggcgcgccaggtgggatctctagcgcctcaggggcccgcgcggcaacagccggcaccctcgggcccgcggacaaagggttaacgcgttggcagtgactgcgggccccggatgtgagagccttggcttgacgccctggctgcgctgcaggtgcgccgggccgaacggagccggcagcctggcggcgacctgaccgcccgaggctccccttcacctgcagcggctgctcggctccctctgggaacgccgccttttctaacttaagggcaacaggtggtgccggtggaccgagagagagctcagctccgccgcgctgggagcggcagttaccctcaccaattagggagcgggggcgggagttgcatggcttccctgatgcgggtgaccaatgggatttgggatcatgagtggaccgggaggagtgggcgtggtcggagtctgagtccaaggtttctcgtgcggcaactgccagagctgcttggagagctaagctggaagggtgcttatccctgcgtagaaacgcctgccaatgctttctcatttggacccagactccagatcgggaggtgagaacgttgttattttgcaaggggtaggaggtaatagtgatcttgggtatgctgttaagcatgtggaattagattccgaagataggactatctgctatgagttttctgccagataggcactttgtggttacggccacttagaccagatactggtgactgggttctttccagaatgaggtctttgaggtttggggacccaggagaaaaacgtacatattactgcaatttaagtaaaccagataatttcaatcactgttattccatcgtttgtcttggactgtgtgtgttttcatgtacgtttcatatctcgtctggtttgtttagcgcagcaagttatagtaagttcttcgtgttgtttattttagcaaagtagagcaaacctgttttaatgtattatttcgggagaataacttattccttcttccgtctcccagcagtcttatagctggatcagctaccaagagaagttgtaaaccaagaagagaaaagcatttcaatttgggacatttatttgcacctggaaatggggaatgggctgtcagaccagacttctatcctgtccaacctgccttcatttcagtctttccacattgttattctgggtttggactgtgctggaaagacaactgtcttatacaggctgcagttcaatgaatttgtaaataccgtacctaccaaaggatttaacactgagaaaattaaggtaaccttgggaaattctaaaacagtcacttttcacttctgggatgtaggtggtcaggagaaattaaggccactgtggaagtcatataccagatgcacagatggcattgtatttgttgtggactctgttgatgtcgaaaggatggaagaagccaaaactgaacttcacaaaataactaggatatcagaaaatcagggagtccctgtacttatagttgctaacaaacaagatttgaggaactcattgtcactttcagaaattgagaaattgttagcaatgggtgaactgagctcatcaactccttggcatttgcagcctacctgtgcaatcataggagatggcctaaaggaaggacttgagaaactacatgatatgatcattaaaagaagaaaaatgttgcggcaacagaaaaagaaaagatgaatatcaatacctattatatctgtgtggagtaggttttctctggtctgattttgacaaatagaagagtgtctacagcgtggtttgcctgtctgccctcctggatgctattaaagctttgttttgttgaacaatcagatgcccaactctgttgccttgtggaagatgagtaaatgcagtgcttcttaaagtggtctcttctccctaccccacaaatcttttggtactaccatttggggaagccaagcaaggatagtaaattgaccagaacacagttgtgggaatttggtctgaagttagtgaaataaaactttaaagagtgtctgcctagtgttttgtgcttacatctttcggggggaagcctttgcaagaaaattgcatacaaggctttgtaacgatcaagtgctaatcgatggaaatgttaaggtagattaacatatatgcagttatattgatcacattggtccaaccagtccttttttgaagtaagggacaaggagtaagtattttcttttttaagtttctgccaaatgatttttgacgctttctggaatcaagtaatttaatagtatagcttaattctagacaatgtttaagttggtctacctttattaaaaataagatatttggggtatattcaagtgcatggattagttttcctgacaaagcatgttttggtgtgtagtcttactttttagaaatagctatgcatcgttctacacaggtttaaaacaacttttttggggatttagggctattataggaatagtttgttgtcagaagcactttcacttgaagaacctaaaatgattgactcattcatagtaaatatgggcatgtaaactaataaatatgcactggatacatatatggatttatgaagaaggcgatttagtcaagaggatgtaattaaaatatgtggtctctaaaatattccagttacaagatatttgttttattaatatttgctggctaaaaacaaatgtggtttttatatatttttgtagtgtgttgagaagagcaaaagctttataaatatacctgatgcgctgtagaatgaaaatgtaaaagataacctgtatgtgttccgagctttaattttttgtttacaaattgaacagtgttacatgggctgtccagtcctgattatagagaggaagaaatggtaacagtatggcagataagaattacaattatagaaaatgaggggaaaataacaaacctgttttatgaaaattcactggtgctgtttacattggaataaaaagctctataaggaggaaaggcctttatctaattcttatctacagacacttacttccagtgaccatattttactaaatcagcttattttttatgtctaaagcaacagctgttctgaaaaatcaccaaaagaaatgcactttgctagcaggatttgttttggctttgggttttgtttttttgttttttttttttttcagtggcataacagtttttggaaccttgattcttgtgtcacacaaaatgaatgaagtagcttgatgtggagccttcatatgttaaatattcctgcactagtgatggtcacttagaatgtttatagaaatgtggataataactaccaataaactacttgaggcactaggagaacagtatttgactttgaattttaatgtatttccacttttgctgaagcttttaatcagatgtgtaaaaacaattgaccagctaggctatttagtcccatagtagttcagatctgcttagatgtgacaggcattgaaggctgtttttttttttttctcccttcactgatactgaaatcatggtatctgctgcaaacatgagtagatccatgatggattaataaagcttgctgaaaaaaaaaatctgtgtatcaattagatttaccagtttgcctgtactttctgtctacctactatgtaaaatagtgctgtttttaagtatttcaaaagcttgtgtgttgaccctttgtagcctaagtacgtaaacaaattaatgttatctaagtttttcatatttcatggacaacaaaagagaaaatggtatgaacactgtacaaactttgatttataaaagacaatttcagctataaaacccatcctaagattttctagcttgctaagttcaagttccctaccgcctattctagttattaacactgtagtataatgagtctttaaattctgaagagtttagactatgctttcatatctagtttcttcttatggcgcaccttttctagtgcatagttctaaaatattttcttgtatttgaagttacttggtttaatacaaaatattaaggactgctcaactgaatccaagttaatatcaaagaacaaagtgtaagaaaaataaaaccttttgatagttaaagat

SEQ ID NO: 12976 - DNA, 1903 bp, Homo sapiens
tgaagtaagggacaaggagtaagtattttcttttttaagtttctgccaaatgatttttgacgctttctggaatcaagtaatttaatagtatagcttaattctagacaatgtttaagttggtctacctttattaaaaataagatatttggggtatattcaagtgcatggattagttttcctgacaaagcatgttttggtgtgtagtcttactttttagaaatagctatgcatcgttctacacaggtttaaaacaacttttttggggatttagggctattataggaatagtttgttgtcagaagcactttcacttgaagaacctaaaatgattgactcattcatagtaaatatgggcatgtaaactaataaatatgcactggatacatatatggatttatgaagaaggcgatttagtcaagaggatgtaattaaaatatgtggtctctaaaatattccagttacaagatatttgttttattaatatttgctggctaaaaacaaatgtggtttttatatatttttgtagtgtgttgagaagagcaaaagctttataaatatacctgatgcgctgtagaatgaaaatgtaaaagataacctgtatgtgttccgagctttaattttttgtttacaaattgaacagtgttacatgggctgtccagtcctgattatagagaggaagaaatggtaacagtatggcagataagaattacaattatagaaaatgaggggaaaataacaaacctgttttatgaaaattcactggtgctgtttacattggaataaaaagctctataaggaggaaaggcctttatctaattcttatctacagacacttacttccagtgaccatattttactaaatcagcttattttttatgtctaaagcaacagctgttctgaaaaatcaccaaaagaaatgcactttgctagcaggatttgttttggctttgggttttgtttttttgttttttttttttttcagtggcataacagtttttggaaccttgattcttgtgtcacacaaaatgaatgaagtagcttgatgtggagccttcatatgttaaatattcctgcactagtgatggtcacttagaatgtttatagaaatgtggataataactaccaataaactacttgaggcactaggagaacagtatttgactttgaattttaatgtatttccacttttgctgaagcttttaatcagatgtgtaaaaacaattgaccagctaggctatttagtcccatagtagttcagatctgcttagatgtgacaggcattgaaggctgtttttttttttttctcccttcactgatactgaaatcatggtatctgctgcaaacatgagtagatccatgatggattaataaagcttgctgaaaaaaaaaatctgtgtatcaattagatttaccagtttgcctgtactttctgtctacctactatgtaaaatagtgctgtttttaagtatttcaaaagcttgtgtgttgaccctttgtagcctaagtacgtaaacaaattaatgttatctaagtttttcatatttcatggacaacaaaagagaaaatggtatgaacactgtacaaactttgatttataaaagacaatttcagctataaaacccatcctaagattttctagcttgctaagttcaagttccctaccgcctattctagttattaacactgtagtataatgagtctttaaattctgaagagtttagactatgctttcatatctagtttcttcttatggcgcaccttttctagtgcatagttctaaaatattttcttgtatttgaagttacttggtttaatacaaaatattaaggactgctcaactgaatccaagttaatatcaaagaacaaagtgtaagaaaaataaaaccttttgatagttaaagat

SEQ ID NO: 12977 - DNA, 310 bp, Homo sapiens
tcagtgttcaaatcctggctctcccgttattacacatgaacctttagcaaattccttgaaacttatgatgagaatgccctcctggttaaatgaagactgtttcatagaattttgagagtgttgaaataacatgtacaaactttcacatattgccaagcatttgataaaaactgacctactattgttaaccagtaggaatcaatatgtttattatttcatctggggcaatttacttgcagccttagtttcttaatttgtaaagtgtgggttatatatatctaccactggggtataactgattaaaaggatt

SEQ ID NO: 12978 - DNA, 209 bp, Homo sapiens
gcgaaaaccaccaccattaacactgaagatgtgaagctcttagccagaaggagtaattcaccgctaaaatacattcagacaaaagtgaagagcttgcgcagattaacctagaacgaaaggcacagaagacaaagaagaggatggaaacaaaaatgcaagggagccagcagaggctggagtacaggaaagttaagaattaaactctcccg

SEQ ID NO: 12979 - DNA, 310 bp, Homo sapiens; identical to SEQ ID NO: 12977

SEQ ID NO: 12980 - DNA, 12638 bp, Homo sapiens
ggggcttctggaggcggcggcggtggccagcgcggcggcgccggccgtattctccgggctgcggagggtaaagagcgggctcgggccgaggctggagggctgggtggggccagagcggcgcttcgggggcccgcggaggacgagggagggagagaatctgaggagctggtaggtttggggacccatctgggtgaccgggccggggaaagggctcggccgggcgtgcgaggggcgtagcggccccagggatgctggagcggagccttagggatgggcaaggccttgggggcggggggaggttctgcaaagggagccactggggtctgcctaggggcttgtgcggagattgcgggcgagaaggggcagaggacggtggaggagactcagatggggccctttttggcggcccgttttggggggtaggggagacggcggttgggggactttgatacatggagcgtggaggaagaggttaatcttgcgaggacagtggaggtcagcgggggagggaggcaaagtgggctttcaggagcgtggaaggcgtcgtccggttcttggaaaattcagaattggagggagtcagagatggttgggggtgggcgggggtgttccatcgatgagggtcttaagagacctgccgagggcaaggaccaggaggggttaaggtagtaacttgggaattttgatcggaatggcagcactttgggaggcctgggacgatcgcttgagccttggagttccaggctgcagtgagccatgattgcaccactgcactccagccagggcgacagagcgagactccttctcaaaaaacaacaacaccaacaacaaaagaagtagacttgagaacttcgttaagacattggccagggagtaaggtagccctgggatttgaggttgaggagaacgtgcaggaatggtgggggattttggctgagcaggttgagagaagtctaggagtgagaggcaaaaaaagacgcaggcagcgtcggggaaatcagaattatgtgtctggagagagttttgcggggtgaaggtggcccagtggggctgttaccaaacttttgagtggttatggggctctaagaggtgacatgacaggacccagcccagtaaacacagcacctctttttgtcgagtttggagcttcagagtggagaggtgggaggcttgtgtttgctggacaggtctgtccattaatctaggagaaaagggtggtgtctcagttcctcacttctgtctttccctgtcttctccagggttgccattaggggactcctgaggtcctatctccaggctgcggtgactgcactttccctggagtggaagctgctggaaggcggaccggccgccatgtccacgttcaggcaggaggacgtggaggaccattatgagatgggggaggagctgggcaggtgagctgtctgcccgcacggctgggctccagggataggagagaggcgctgtggggttttctgaacagcagctctcctttcctgttctttatcctgtatgctgagaaggaatgagtcagtatcatgcggtgggggaacgaatttgggccgtggagtcagacagccccggctgtgaattcctgcttgggaatcctctgtgtgtttcctgtggggagaaaagtaattgagccgttacagcagccaagaccgtgcctggcatggggcaccagagcaacagatgccagctgcttttgttattaaaagatgtgtcttctgcctgggcaacatagcaagactccatccctacaaaaaataaaaatgaaaaaaaattaaccaggtgtggtagctcatgcctgtagtcccagctactagggaagctgagacgggaggatggcttgagcccaggagttggaggaggctgcagtgagctatgatcgtgccactgcactgtagcctgggcaacagagtgaaaccccatttatttaaaaaaaaaaaaatctccctgtgttaatcctcttttgtgggaggcactttagtttttttgcccagctcttggatgtttaaagtggggggagggaggggcgtgtctcccagctgggcccaaacctcggtcaattgtttaacatgcttgtgggaaaaagcagaggtttcctcttccagggaggcagctgatttcctgcctgtctgggccttggagggtccccctggggccccaccccctccagactagccaggcaccactaggccctgcctccttttgtagagcctccagccttatttggtgagtttgctactggccagcctccctggagcctccccatgatgtcaccagaagggaatgtaaataagtgagctctgtgtcaggctagggagagtgctgcaggctcttttgggatcctgaggtccctccttcaggaatttcctcgttagtggcagagaaagcatgctccctcctcccccttctcatgcttcagtgttgacccctcctgctaggggtcgtttggcaaaagtcagcaaaattcagccaaatttcttttaactcgccgatttcacctctaggaattaattcattggaaaactgtacatacatggatggaatgacttaagactggggtagttgctagaacgtttaccagaataacagccttttttttttttccttgacactatctcattctgtcgcccaggctggagtgcagtgatgcgatctcgactcattgcagcctcggcctccagcctagcctcccgagtagctgggattacaggagcccgccaccacccctggctaatttttgtatttttagtagagacaggatttcaccatgttggccaggctggtctcgaactactgacctcaggtgattcacctgcctcggcctcccaaagtgctgggatcacaggcgtgagccaccgcaccccgctgggaacagcagcctcttaaatggccttccccaaaccactgcatcagggctggaataggatgcagcttgtaaaaagaaccaggcagggccaggtgcggcggcttccgcctgtaattctagcgctttgggaggccaaggcgggaggatcgcttgagcccaggacttcaagactagcctgggcaacataagttgacccccatctctcaaacaaacagaaattcataattttaaaaaaagtatttagccttctgtttttgccgtgaagccttggaggtctggtgtgtatttcatgtcgcagtttttctcgggactggccacacctcacgggtttgacagctctgggtggccagtgtctgctgttctgacggcactgcttcaggtagtggtctggaacattctcagagatacatgaagtgcaagatgaaggcccagaatgtagcaatttttgtttgtttgtttgagacggtgtctggctctgttgccgagactggagtgcagtggtgccatcttggctcactgcaatcttcgcctcccgggttcaagtgattctcctgcttcagccttccaagtagctggaattacaggcgcccaccaacgtgctcagctaatttttgtatttttagtagagacggggttttgccatgttggccaggctggtcttgaactcctgacctcaaatgatctgcccgcctctgcctcccaaagtgctgggattacaggtgtgagccactgtgcctggccccagcccacactttttttttgagacggagtcttgcagtgtcgcccgggctggagtgcaatgccgcaatctcagctcactgcaacctccgtctcccaggttcaagcgattctccttgcctcagcctcccgagtagctgggattatagatgcctgccagcacgcccggctaatgtttttgtatttttagtagagacgtggctttcactatgttggtcaggctagtcttgaactcctgacatcgtgatctgcacgcttttgcctcccaaagtgctgggattacaggcgtgagccactgtgcccggcttcccagcccgcatttttaaacatcatgaactctatcagtagaaattgtcggtgtgtaggccacgcttgggtcgtgtctgggttgtggcaggcacttaggaagtgggttgggagtgacacctgagaccatcactgaggagggcttgctgtgcccccacctgcgctgggggctggggaagttacagagaagcgaagagggtgggctcagctcttggggagtttctttcccggctggggagatgaggcacgtttcacattccgtagaggaactgagagcctgccagtggccttgcctctaaggagcaagtctgtggccagtgagaccgggggctgtctggaggtgggcggctgtggtctgctgttgctgtaggaggactcagtggcagaacctgaaatctggttggcaatagcaaaacagggaaaggcgtggtttacagaaccaggttgtccaggtgtgcagcggccgcaggtgtgactgggtgctggtgcatatggtgccctgtgtccccggggccgaagtccactccagcatggaggaggcgccctggcagagtgaatgacggggcttatgtgccacccgcagtgcctggtggctcccctctcctggcctggtctgttcttaggcaggcttcttaggtagccttctacgtggtggcccctgccgcgagcctggatccaagcccagcagagggagagagagatcctctcttcccagcaggcgttcagagccctgtggactggaccggtctctttgggctggaaggcgtggttttctgcttgcccaggtccagtcgtgtccccttccacccctttcctgggccactgagtcccacagactgagagtgagcggcaaaggctgccctgggacagctgggtctgttagcaggagacagcgtggagccgggaggtaggcacgcaggaacccggtacccagcagcagctgtctgcttcctgttagagcacctgggctctggagcctgcagcacctggtttgaaggtttgaatcctcccgccactgactgactgcatgaccttgggctagttgctttccttttctcagccttggtttctttaaaatgcggatactggccagatgtagcggctccacctgtactgccaacacttggggtgggggagtgggaggatctcttgaggccaggagttccaaagcagcctgggcaatacggcaagaccctgtctctacaaaaaataaataaatcaggtgtggtagtgtgttcctgtagtcccacctacttgggagggatcacttgagcccaggagttcgagaccagcgtgggcaacatagtgagacctcatccttacaaaaagaaaaaaaaattaattgggtgtggtggtatgtgcctgtagtcccagctgcttgagaggctgaggcaggaggattgcccgagcccaggaggtcaaggctgcagtgagccatgactgaaccactgcattccagcctgagcaacagggccagaccctgtctcaagacaaaacaaaacaaaaacaaaaaaagcggatctggcacttgccttgcactttttatttttttgaggcaggatcttgctacgttgcccaggctggagtacagtggcacaatctcagttcactgcaacctctgcctcccaggttcaagcgattctcctgcctcagcctcccaagtagctgggattacaggcacccgccaccacacccagctaattttttgtatttttggtagagacagggtttcaccatgttggccaggctgctcttgaactcctcagctcaagttatctgccctcctcgaactcccaaagtgctgggattacaggcgtgagccaccgcgcctggccccctcagttccctcttgatatgcattgaactgttcattctttcacttttcaaaaatacgccggtgccatggtgttaacgtgtggctctgcactcccctccacacacctgctgggcatagccctgggaggggtgggaacgccgcgtctgatggtgtggggcgctaaggaattgctctctgagaaggcgcagagtctgcacccccgcagtggccagctcatgtccttcaagtgcctggtgcagggccgcgcccaagaggagcaagtggaggtgacggggagccagccacccccacttactccctccgcctcctccacccccactcactccctccccctcctccagcggccagtttgcgatcgtgcggaagtgccggcagaagggcacgggcaaggagtacgcagccaagttcatcaagaagcgccgcctgtcatccagccggcgtggggtgagccgggaggagatcgagcgggaggtgaacatcctgcgggagatccggcaccccaacatcatcaccctgcacgacatcttcgagaacaagacggacgtggtcctcatcctggagctggtctctggcggggagctctttgacttcctggcggagaaggagtcgctgacggaggacgaggccacccagttcctcaagcagatcctggacggcgttcactacctgcactctaagcgcatcgcacactttgacctgaaggtgagccctgtagggccctgtggggccggcctggccagtgtgggggtggggatggggcggggaagagcctggaaggcacctcctgcgcgtgggggtgaggtgtggggagcgtgggggtgaggtttggggagcgtgggggtgaggttgggggagcgtgggggtgaggttgcggggagcgtgagggtgaggtttggggagcgtgggggtgagggtgggggaggcccgtgctttccctgctgagcctcctcccaccccagccggaaaacatcatgctgctggacaagaacgtgcccaacccacgaatcaagctcatcgacttcggcatcgcgcacaagatcgaggcggggaacgagttcaagaacatcttcggcaccccggagtttgtgggtgaggccctgcccagtgggcagccccggcctggggagggtggtctggggctgcctgctgtgcgtggggtgggtcatgcccggtgctgggtgccgcgtcctcggccctgaagccacccctcttgggcccggctttgcgggaggtctgggcctccatttggtgcagccccgctgtcctacccgtcaggccctgagggccagctctgccgcattcatgcccccaagggctgcgacatgtgagaaccttgaccccatgcctgtgtcttgagcctcttccttggccagcatgtccccagtgcctgacccacatctccctgttctgcagccccagagattgtgaactatgagccgctgggcctggaggcggacatgtggtgagtgtaccacctgctcccaccgggcctccctgcattcctggagcgcaggccagtgctgcagctggggatgaagcggggccttgctgctgttggggtatggggggaccgttgccctagaacaggggcgctggacgccacggtcctgggagggtgggcggccccacgctgcgctgacccttgcctcttgtctgtccccaggagcatcggtgtcatcacctatatcctgtgagtacctggcgggggccccctcggctgtgcaacacagctggcatgggtccccggctccgtgtgtctcatgtggacgccaggggtccccagcctggctgtgacccatcgcgggtactcaggggataccgggtgaacggatgagtgattctctgtggctgctgtcacagaggcttctggagagttctgaaggcaggacactcacagagcggctgagcaggctccgggttgggggtcgtgtgtgctcctgtccctctggctgctagggagcccagcctcctctcgaagtgcaaggaaggggtccgaccccacgctgggttttggctcctgtccctgggccacacgtgggcctgctgttgtttattatttttatttgttgagacggggtcttactctcttgcccaggctggagtgctgtcctagctcactgcagcctccacctcccagacttaagcaatcctcccacctcagcctcctgagtacctgggactacatgtgcacacaaccatgctcccatgctcggacttttttttttttttgatggagttttgctcttgttgtccaggttggagtgcagtggtgcgatctcagctgctcactgcaacccccacctcccaggttcaagcgattctcctgcctcagtctcctgagtagctgggattacaggcgcccaccaccatgcccagctaatttttgtatttttagaagagacggggtttcaccatgttgatcaaggctggttttgaactcctgacctcaggtgatctgcctgcctcggcttcccaaagtgctgggattacaggcgtgggccgctgcacccagctggctaatttttttttttttttttttttttttgagacagagtttcgctcttgttgcccaggctggatgaagtgccaaggccccgtctcagctcaggcttactgcaacctctgcctcccgggttcaagtgattcccatgcctcagcctcccaagtagctgggattacaggtgcctgccaccatgcctggctaattatttgtatttttagtagagacgatgtttcaccatttcggtcaggctggtcttgaactccagacctcaagtgatccggccgccttggcctcccagaatgctgggatgacaggtgtgagccaccgtgcccagctggctaatttttaaaagtttttgtagaggtggagtttcactgtgttgcccagccatattgaatgggcatagctcattcagtaagcaaggaaataaacaatggcgtgggcccagcccgctgtagtgcgtgagcggacccaaaggcttcaggagatgggctagaccgtttgtattctttttaaatgttcagataattcagacttacaaaggagcaacagaaacagcacagacgccccctgcagcttcctcctccttcagtttacatttttcatgaacacgaacgttatgaacaccaagacgttagccttggtgctacgctaatcacaaaagtgctagatgggccgggtgcgatggctcacgcctgtaatctcagcactttgggaggctgaggagggcagatcacgaggtcagggcattgagaccatcctggctaacacgatgaaaccatgtctctactaaaaatacaaaaattagctgggtgtggcagcgggtgcctgtagtcccagctactcaggaggctgaggcaggagaatggcatgaacccaggagatggagtttgcagtgagccgagatcgcgctactgcactccagcctgggtgacagagcgagactccgtctctaaaaaatttaaaaaatttaaagtgccagaggtggttagacacccccgttttccactcctgtcctctctgaggtccccacacggcatttagccattcagctccttcgccgcctccagtctgaggctgttcctctgtctggctttcatgaccttgaccctgacttgtgctcacgggtcaggtgttttgcagaaggcgtctgagtccacgtttagtctcgtgcgctgtcacgatcagacgatcagacggggcttcagtgtctctgctcaaaaccccagggatgatgctgtgtcaccctcccagcgtcaggctgggaggcagacgctgttggggcctctcactgccgggctgttgaccttgatcctttggctaaggtgttggctcgggctccccactgcagttaccctcccctcggcgttactgagcactgggggctttcgggctctgcgtctgcacagatacttcgagtctccaaggagacttctgcctgttcatttctgctgctgtcagtggcggggtgggggggtggattttgaatgcctcttgggtggtgtctgggatcgttgcaggaaggttctaagggctcaggagtgtgagtggcccaggcacctgccgtcagcctgtcttctgtgctccgcctgtcgtgggcagccggagaggcggcgcggccgtggtgggagcccaggaccccactgagcccccacgcctgtctcgcagcctgagcggtgcatccccgttcctgggcgagaccaagcaggagacgctcaccaacatctcagccgtgaactacgacttcgacgaggagtacttcagcaacaccagcgagctggccaaggacttcattcgccggctgctcgtcaaagatcccaagtacgaggggccggcagggggcacggggtgggacatgggacacaggcccactccacccacggaggctccagaggactctcctcccagcgccacctccctgcggctggggatcagacattgcttaccccttgggctggagagagtaaactgataaactggtggcccaagctggccattgccatggtttttttttttttttttttttgagacggagtctttttttttgagacggagtcttgctctgtctcccaggctggagtgcagtgcagtggcgtgatctcggctcactgcagcctctgcctcccgggttcaggctattctcctgcgttagcctcccaagtagctgggattatagacgcccgccaccacgcctggctaatttttgtatttttagtagagacagggcttcaccatgttgcccaggcttgtcttgaactcctgacctccttggtttgtgatttgcctgccttggtctcccaaagtgctgggattgcgggcgtgagacaccgtgtctggctgcttgctgtgtttttagcaaacttttaattagttgccggtgtgtaaagtaaggatccatgtaaaattccaggtcacttgttttcctgtaaacacttagaattctggcagtgctgagccctcactcgtaggcctccccgggcctccatggccgcccagtccctctctcgggcgcctgggtttgcgactccagcctgaggtctcagctctctccaccaccccccagaaaaccccacgctccctgcagtacccttgttcagcttctgtggttggctgagcagaggctggggggcgactttagggcttttgggggtcccgggagtcagttgttcacgggaggacgggacagatggtgcaggtgtacctaaccagagcgggggtcttccaggcggagaatgaccattgcccagagcctggaacattcctggattaaggtaagtggggaggtgggggagctccctgggcttcccgccttggccttctcgctggggtcccggggggccttcagcatttaaggcttgtggatgtgacaacccccagtggctggggagggtccccagaggagtgagcctgtgtggcgggggttgggtcctgggcgtgggatgtccagcacccgacagacctggtggcatccttggctggtgtgtgtccaacggggctgactcctggggccagggccgcagcgtttttctcgagagagcactctcggctttgcgtcgggctgggcagtctccgtcacgaggcgttgactctgctgccggatgagcccctgaacctcagttcacactggcaggtgggggctggcggggctgggtggcatcgcggggaccccgctcaggcttccctccttcctaggcgatccggcggcggaacgtgcgtggtgaggacagcggccgcaagcccgagcgcgcggcgcctgaagaccacgcgtctgaaggagtacaccatcaagtcgcactccagcttgccgcccaacaacagctacgccgacttcgagcgcttctccaaggtgctggaggaggcggcggccgccgaggagggcctgcgcgagctgcagcgcagccggcggctctgccacgaggacgtggaggcgctggccgccatctacgaggagaaggaggcctggtaccgcgaggagagcgacagcctgggccaggacctgcggaggctacggcaggagctgctcaagaccgaggcgctcaagcggcaggcgcaggaggaggccaagggcgcgctgctggggaccagcggcctcaagcgccgcttcagccgcctggagaaccgctacgaggcgctggccaagcaagtagcctccgagatgcgcttcgtgcaggacctcgtgcgcgccctggagcaggagaagctgcagggcgtggagtgcgggctgcgctaggcgcagtggggtgggccaggccccaggacagccggagctcggcctgcggtgggggcgcttcctgtggacgctgcgcctcccatcgcccgggtgcctgtccttgcccagcgccaccaggctggaggcggagtgggaggagctggagccaggcccgtaagttcgcaggcaggggtgggtgtgggacggggctgcttctctacacagcctccacgctggccttcaccttcacccctgcatcgtcggtgaccctgggaccctccaggcagcgtggcctgtggcaccgtgagggttgggacccaccgaggcgcagaggcggcccgaatgcagccctggttcaggcccggaggagggtttgcgggtagttgcacggacaattcggcggggtgctgcctgttgctgccattagcccaggaggaggtcgtgggacggggagggtgggatggacggcggacaggcagtccccacgctgctgggtggcgccgggcttggtggggtcttccactgtgtgcccttctcgccgaggccggtcccccgggtgtggggtgccctgctgcggactcctccgcgagccccatcgtcgcgcctgtggacgcctaggcaagagcggccctctgcagccaagagaaataaaatactggcttccagatac

SEQ ID NO: 12981 - DNA, 280 bp, Homo sapiens
ttttttttttttttttttgaggtggagttttgctcttgttgcccaggctggagtgcagtggtgtggtcttggctcaccgcaacctccgtctcccatgttcaagcgattcttctgccccaacctcgcgagtagctgggtttacaggcatgtaccaccacaccgggctaattttgtatttttagtagaggcagggtttcaccatgttggtcaggctagtcatgaactcccgacctcaggtgatccgcccgcctcagcctcccaaagtgctgggattacaggc

SEQ ID NO: 12982 - DNA, 278 bp, Homo sapiens
gtggctcatgcctgtaattcctgcactttgggaggccgaggcgggcggatcaggaggtcaggagatcgagaccatcctggctaacacggtgaaaccctgtctctactaataaatacaaaaaattagctgggcgtggtgacgggcgcctgtagtcccagctattcgggaggctgaggcaggagaatggcgtgaacctgggaggtggagcttgcagtgagccgagattgtgccagtgtactccagcctgggtgacagagcgagactccgtctcaaaataa

SEQ ID NO: 12983 - DNA, 2778 bp, Homo sapiens
ataaagaagaaagtaggtgggttacatgaaagcagttatacatcaaaaatatggttttcttcatcttcttttcctccttttcctttctcttcatcgtatctcttcagccacattcacccttaacacaaaaagttcctcctgaaatcctcatgctattttcttggctcaaatccctttgactaccccagattttttggaagaaatccttccaaaggtatttttcatctcaaaaagtttttttgcattcattaccttacttcatgccctcttctttcaaagttccagagagcactgcattcactttgctgcattaagagggaaatagcgtcttctctcctcctatcctgttattgactctcttgtggcttctttcttcatcagagaagcaagtggctcaaccagggcttagaaaaggcacagtgatcaagtctgttcagagccagcctctggctggtgaacatccttgtacttcctgtcctgatctcactcacccctaaggaggcagagagaagggtaaccagtgtggctatcttggctcatcctcgtgggtacaatcaatagctgaggcatgggcttggttgtagagaaacaagtggggccagaggagaggggagaaaggagggaggggagaaagattcccccattggaaattctgctgggattcagtatcctagctattctgatgtcctagatttgaatctgggtttctaaacatatgctctacattatgaaaatgcccaaaaacacatataaattggcttttcttctgtgtttgtcctacattgcagttctataactattttattaagctctctagaactggttcttatatttaccaacactggttattaggttttgaaactcaaaataagaaccatttgtaggcatctgtataaaacaaaatacttattgatcatctactaagcattataccaggctttataacttcctcattcttcttctaagtgttcagtgacttgtggctatttctctaattaaattgaaactcctggtgagaaactttaaggctctccaacaagcaatgtatgttccctcactgtaacttctgtcccagccatacaaactccttctcagttcaccttctctcaagtccaggctttcttcagtgttacttgtgtacctaaaatatgcctatagttcacctcacctccatcctacgtcctatcactgatacaaggggaaatatatatatataatacataaagtcttccttatgatgacttcaaaagaccaagggagggtgtatggttttttttcttacctcaatattcaaatccctgaggttgtcacaaacaatatcaaatcatgattaaataatgatttaattttcttttgtaagttcttaaaattagtatattaatgataatctgcttgaaatcaagccttattgctcttcccatggaattcgaatgatgacaataaattataaacccatcactgtattttcttcattctgtaacatgtcaagtatcagcttaataaattctctgggctacatttgaagtttcttggttaaaaatcagagatccaatgtatcttaaagttaaatttttagatatctaaaaaacatagcatactgcatctgtaaaaatggcatgctgaactttcacaaattattcagaaacaaattttatttagagaaatttaagctaaaaatgcagcaaaccagaaatcagttactgaatgcttcacaatccccagaaaatgagaattatgtaagaaaggaataaaggcaaattttacattgaccctcacagagcaaaattacaggagttctgttctctttgattactaactcagaaataatttatttcaagcttttagcactgaagatgttagttcaaaaaccacatgtttattcttatgcctgtgttgataaaactttgctaaatattttatatgtattaaaaatggagaatgaaagagatgtgtttcaagagccttttacagataaatcctaacaatcaaataggaaatagaacattaatgtgaataaaatgctctggcaaggtaggaagaaatgaataactggaagtagagagtccttagcattacaaagtggtaagatttctaaaacagtcatcttgtgagttttttatgcactgttaatagtaacaatacgttccatgaattatgcagttgggatgatttctccttgtgtggattgccagttctagaaatcagtaaaagtgaagaatgagttgaaaaacctatcagcctactgaatctactaaagcctctaaaatattcaatgtctaattgcagcaatttgtatttcataggtgccatatcaaaatcttctccattgaggtcatgattgagtctttaaaaaaaaatttccagatgtgaagatatatatatatacattttaagtttccagcattgtgtgtacaagaaaccaaaacctccatggagggcatgctgatgagttgcatggcacaattgtcatttctgttttgattgcatgtcctatttttgaacctgtaaaagtgtgtagtgcatatatgtgtgtcctatatatggcaatttgtctgatagtgtgtttgagttctttctggctctttttctagcagagttcaatccacagctttcttcattggagaatttgtgaaataaaagtgagttaatttgtgttacacactctcttaaataacctagacctacaaattgcttgcctaaggctaaaaaatagaaaattcaaagaaacatatgaatgatctcagttggcctttgatgagtaaaaaaaaaaaaaaaaaa

SEQ ID NO: 12984 - DNA, 2781 bp, Homo sapiens
ataaagaagaaagtaggtgggttacatgaaagcagttatacatcaaaaatatggttttcttcatcttcttttcctccttttcctttctcttcatcgtatctcttcagccacattcacccttaacacaaaaagttcctcctgaaatcctcatgctattttcttggctcaaatccctttgactaccccagattttttggaagaaatccttccaaaggtatttttcatctcaaaaagtttttttgcattcattaccttacttcatgccctcttctttcaaagttccagagagcactgcattcactttgctgcattaagagggaaatagcgtcttctctcctcctatcctgttattgactctcttgtggcttctttcttcatcagagaagcaagtggctcaaccagggcttagaaaaggcacagtgatcaagtctgttcagagccagcctctggctggtgaacatccttgtacttcctgtcctgatctcactcacccctaaggaggcagagagaagggtaaccagtgtggctatcttggctcatcctcgtgggtacaatcaatagctgaggcatgggcttggttgtagagaaacaagtggggccagaggagaggggagaaaggagggaggggagaaagattcccccattggaaattctgctgggattcagtatcctagctattctgatgtcctagatttgaatctgggtttctaaacatatgctctacattatgaaaatgcccaaaaacacatataaattggcttttcttctgtgtttgtcctacattgcagttctataactattttattaagctctctagaactggttcttatatttaccaacactggttattaggttttgaaactcaaaataagaaccatttgtaggcatctgtataaaacaaaatacttattgatcatctactaagcattataccaggctttataacttcctcattcttcttctaagtgttcagtgacttgtggctatttctctaattaaattgaaactcctggtgagaaactttaaggctctccaacaagcaatgtatgttccctcactgtaacttctgtcccagccatacaaactccttctcagttcaccttctctcaagtccaggctttcttcagtgttacttgtgtacctaaaatatgcctatagttcacctcacctccatcctacgtcctatcactgatacaaggggaaatatatatatataatacataaagtcttccttatgatgacttcaaaagaccaagggagggtgtatggttttttttcttacctcaatattcaaatccctgaggttgtcacaaacaatatcaaatcatgattaaataatgatttaattttcttttgtaagttcttaaaattagtatattaatgataatctgcttgaaatcaagccttattgctcttcccatggaattcgaatgatgacaataaattataaacccatcactgtattttcttcattctgtaacatgtcaagtatcagcttaataaattctctgggctacatttgaagtttcttggttaaaaatcagagatccaatgtatcttaaagttaaatttttagatatctaaaaaacatagcatactgcatctgtaaaaatggcatgctgaactttcacaaattattcagaaacaaattttatttagagaaatttaagctaaaaatgcagcaaaccagaaatcagttactgaatgcttcacaatccccagaaaatgagaattatgtaagaaaggaataaaggcaaattttacattgaccctcacagagcaaaattacaggagttctgttctctttgattactaactcagaaataatttatttcaagcttttagcactgaagatgttagttcaaaaaccacatgtttattcttatgcctgtgttgataaaactttgctaaatattttatatgtattaaaaatggagaatgaaagagatgtgtttcaagagccttttacagataaattctaacaatcaaataggaaatagaacattaatgtgaataaaatgctctggcaaggtaggaagaaatgaataactggaagtagagagtccttagcattacaaagtggtaagatttctaaaacagtcatcttgtgagttttttatgcactgttaatagtaacaatacgttccatgaattatgcagttgggatgatttctccttgtgtggattgccagttctagaaatcagtaaaagtgaagaatgagttgaaaaacctatcagcctactgaatctactaaagcctctaaaatattcaatgtctaattgcagcaatttgtatttcataggtgccatatcaaaatcttctccattgaggtcatgattgagtctttaaaaaaaaatttccagatgtgaagatatatatatatacattttaagtttccagcattgtgtgtacaagaaaccaaaacctccatggagggcatgctgatgagttgcatggcacaattgtcatttctgttttgattgcatgtcctatttttgaacctgtaaaagtgtgtagtgcatatatgtgtgtcctatatatggcaatttgtctgatagtgtgtttgagttctttctggctctttttctagcagagttcaatccacagctttcttcattggagaatttgtgaaataaaagtgagttaatttgtgttacacactctcttaaataacctagacctacaaattgcttgcctaaggctaaaaaatagaaaattcaaagaaacatatgaatgatctcagttggcctttgatgagtaaaaaaaaaaaaaaaaaaact

SEQ ID NO: 12985 - DNA, 1887 bp, Homo sapiens
ttggaggatatcttcaagaagagcaagccccgctatcacaagcgcaccagctctgctgtctggaactcaccgcccctgcagggcgccagggtccccagcagcctggcctacagcctgaagaagcactgaggctggcctgcggccttcttggcagcctcacctcctgtccatgtctatctgtctgtctgtcggtctctgtcttggtctgttgccctccttcttggcatgccattgtggagggcttggccaggtgtatataaacgtcctctgtgctgggtgtttctgctgcaggtggcaggtggccccaggcctgtttggaggatgggctgggtgggtgggtggggaagaaatgggcccagccccacatggcctgcagacagtgctctgtaaatagttgttttaatttagctgaatgttagcattttagtctttggcattttagcgtttgggaggtagattaataaagtatattccttcaagcctgctgttgataccatgaagactgggcgcctcagtcccagccctgtagctgtgtgtcttgggccaccagtggcctgcaggacgaaggtactgttccatcacctgcggtgtgcctcaggatcaccaggtgcaggcccccaccctcggagatgctgctgcagtgagtggttccactgcctggataacccttgaggaacacgtcagttactgtcacgatggggcaggtggagctccttcctattttttggggtgctccctgtttgtaaaggggagtttgttcattgggaaagacctgggtcttgacacggccctgccacttagtcccctaccctctccattccccaggctccacccgtgctgctcaggtgcaaatggacttgagaacatctatgtgctggtgaagcatgaggtctgagtagaaaaggggtatcccttgagaccaccttgggaccagtgcttgcaagcagcgagatatttccccagcaaaaccaggcagctgctaattaaatgcttagaaccaatgaaagctggctgtggtcctgcctgtgagctgcctactgctgccttctgaatgcatatatctgctactgtagccccgggttgtcaaactatggcctgtgggccaaatccagccacagtcggttctttaaagttttatcgaaacacaagcaatggaaatgcccatttccattgttgtctccagttgctctgctccgagggcagtgttaagttgtgcagcagaggcccctccatgcaaagctgaatatgtttactatttgaactttttcagaagttctgcttaaggacaaaataaagcctaaatccaagaacacttttaaaaatgaggaaatagtgaacacaatagacggaagtctggaagtttctacccatgccaagaaaagcattttatgttttgttcacatatgttgtgcaattcaaatttttttccctatattctctgactagacacttgtactgagtcaattggcgagtgtgtctgtctaaaaccacaatatcaaaatatcacttaaagcatctttacatagtgtgtttaagaaaaagttgttattcagcagaaaggtaattccaattggtctgcatatttatcagcacttggtattgtctgtttcttattttagccattctgataggtgtgtactgatatctaatcatggctttaatttgaatttccctaatggctgatggtgaacatcttttcctgtgcatttctgtcatctgtatgtctttggtgaagagtcttcaaatcttttgttcatcttaaaattggattgttatattaccgttgggtttaagaatctacatattatggatacaaatatgttgtcagatatgtgctttgcagcattttctcccagtctgtagcttgtctttaaaaaaatttttttt

SEQ ID NO: 12986 - DNA, 1546 bp, Homo sapiens
ggcccagccccacatggcctgcagacagtgctctgtaaatagttgttttaatttagctgaatgttagcattttagtctttggcattttagcgtttgggaggtagattaataaagtatattccttcaagcctgctgttgataccatgaagactgggcgcctcagtcccagccctgtagctgtgtgtcttgggccaccagtggcctgcaggacgaaggtactgttccatcacctgcggtgtgcctcaggatcaccaggtgcaggcccccaccctcggagatgctgctgcagtgagtggttccactgcctggataacccttgaggaacacgtcagttactgtcacgatggggcaggtggagctccttcctattttttggggtgctccctgtttgtaaaggggagtttgttcattgggaaagacctgggtcttgacacggccctgccacttagtcccctaccctctccattccccaggctccacccgtgctgctcaggtgcaaatggacttgagagcatctatgtgctggtgaagcatgaggtctgagtagaaaaggggtatcccttgagaccaccttgggaccagtgcttgcaagcagcgagatatttccccagcaaaaccaggcagctgctaattaaatgcttagaaccaatgaaagctggctgtggtcctgcctgtgagctgcctactgctgccttctgaatgcatatatctgctactgtagccccgggttgtcaaactatggcctgtgggccaaatccagccacagtcggttctttaaagttttatcgaaacacaagcaatggaaatgcccatttccattgttgtctccagttgctctgctccgagggcagtgttaagttgtgcagcagaggcccctccatgcaaagctgaatatgtttactatttgaactttttcagaagttctgcttaaggacaaaataaagcctaaatccaagaacacttttaaaaatgaggaaatagtgaacacaatagacggaagtctggaagtttctacccatgccaagaaaagcattttatgttttgttcacatatgttgtgcaattcaaatttttttccctatattctctgactagacacttgtactgagtcaattggcgagtgtgtctgtctaaaagcacaatatcaaaatatcacttaaagcatctttacatagtgtgtttaagaaaaagttgttattcagcagaaaggtaattccaattggtctgcatatttatcagcacttggtattgtctgtttcttattttagccattctgataggtgtgtactgatatctaatcatggctttaatttgaatttccctaatggctgatggtgaacatcttttcatgtgcatttctgtcatctgtatgtctttggtgaagagtcttcaaatcttttgttcatcttaaaattggattgttatattaccattgggtttaagaatctacatattatggatacaaatatgttgtcagatatgtgttttgcagcattttctcccagtctgtagcttgtctttaaaaaaaaaattttttttttttattt

SEQ ID NO: 12987 - DNA, 1733 bp, Homo sapiens
ttttttagagatgggatcttgctacgttggccaggctggtctcgaactcctggcctgaagtgatccttctgccttggcctcccaaaatgctgagattgtaggcatgagccgccatgcctagcccagcttgtctttttgtttacttaccagtgtttttcagagaacaaaaattttaatttgatgaagtccaattaattaaatttttaaaatagagtgtgatttttttgtcatgtctaagaaactattgtctagtcctaggtcctaattctcctttgttttcttctaaatgttttattattttacatgttaacgtttagatttatgatctattttgagttaagttttttttaagtatgaggtttatgttttttgtttgtgtttaggagcatatggatggatgtctagttgttccagcaccatttgttggaaagactatcctttctctgctgaatttcttttatatctttgtcaggaattagccatattggtatgggtctatttctagactttttattttctcccattgatctgtacatctctccttttgccaataccacataagtcaagatgactatagctttgtaataagtattaaaatctggtaatataattcttccaattttatttttcttttaaaattattttgactattgtatcagtgttacctttccatttaaattttaggattagcttagctacaaaagtcctgctgggattttgattagaattgcattaaatctatagataagtttggggagaattaacatatttatgatcgccttttaatccatgaacatgacgtgtctctccatttatttgcatgtttagtttctttcttcagcattttatagttttagcatacagatcttgtacatattttcttagatttataactatttattttcttggagctgttgtaaatggtattgtttttctgatttttggtttctacttgttcattgctggtgtatagaaatacagttggcttttgtgtcggctttgtatcccgtgatgcaagtaaagcagtactgaggggaatttatagggctcaatgcctgtgttagaaaaaaaggtctcaaatcagtgacctcagcttccactttaagaaactagaaaaaaaagaccaaattaaaagtgtacacagaaaaggggaaatcatgcaagtaaaacagaaattagacattaggaagagaaaatatagaaaattaattaaccaaaagctggttctttgagaagctcaagaaaattctctttagactgatcaggagaaaagatagattaccaatgtcagaaattaggtagcttcactacagattctacagatattacaacaataataagagactattacgaataacttctaggcatacatttgacaatttagatgaacccatgcagattccttaaaagatacaaattagtttacttaggaaaaagtggaaaacctacatagctctatgaaagatgtgttatcacaaagaaaacggtagacataggtagctttagtggtaaatgttgccacgtatttaaggaaataatactaattctgcacaacctctcacaagaaatataagaggaaagaatactcagttctgtctctgaggccagcattgctttgatccccaaatcagacattgcaagaaaagaagacaattatccctcatgaacatcaacacaagaattcttagagttttatcaagtccaacaagttaaataaaaaggattacactttt

SEQ ID NO: 12988 - DNA, 15727 bp, Homo sapiens
atgctcacctgttacaccagttttaggataaagaaactggaagaattcctcagggatcagtccataacgaacttttcctccgtattcaggaagaggtggtacagggacaaggtgtggctgccctgtatgaaaggtccttgttgcctgcaataccctacaggtagtaattgtacaaatgtaaagcctgtttctttaaggagaatacagtgtatgaataatgagcagaaacaataaatagggttgataattgaggcagttttctaactctcataatggaaagagaatggactgggaatggaaggttagggtccagtaatcagctgtgacaacagcaaagaattaatcacagacatttaaccttctacccaatactggaatcccttctatcagccttgcagatcatctgtctagcactttgtatgtctatcattagcactgaaatatgtaagaatgtggacgtggcggtcagataggcatcttgagttcaaatcctagacctgctccttgactttgagtaaagaacttaagcttttgtaatctcagatttctctcagtaaaatggaaatagaagataataccttatatggttgttgagaggattaattgagttaatatatgtgacgtgcttagaatgatgcctggcacatggaaaagttctacgtaagtggttagctattatatgcctgatatgttgtaagctcctggacctttttgaatactctctttgatgagagtgctaaacactatatgtaacagactttttcagtactgggtagctctaattatgttcatctttgaattgagatgatacatacattcttggaacctcaatccattcttagttctaattttgcttttctatgtaagataacacacatgtacctgggtcaaacatctgttccctcacaatcctgattgcccgtaaggacttctctggttttatcttttttttttttttttaatgaggtatacagaactgaatataatactttaagtatagtctggccaatttattcatcctacaaatacttattgagaacttactattgccagtactgagcttgaacaattgaactattatcaacagtggatttggaaactattcttgtattaaagcagcttaagactacacttttaacagttacagcatactgatgtctccttaagcttctgatgaaataaaatctagtccctttatatctgctgtcatttagtctccttcaagttttcagtgtatttctgtcccacttcctaccctccattcctccaatctctcaacttctatctccttgtaatataagaatttacattatttcatttattttggtacaatgcttatcttttgaatattatttctgcctccaaatatattagctaccccaccaggttttgaaatctgagaatcatgcttgagatttcttcatttacatcaaggtttctcaattcagcactaccgacgtttgaactggatatttctttgttgtaagaggttgttctgtgcattgtagaatgtctggcagtatctttgtggcctttatacaataggtaccagtagcccctccctccccgacccatcctatggtaacactgaaaaatatctccagacattgctaaatgtcacctgcaggcaaaccaccccaggctaagaagcactgatttaaatcatagcactaaatggtatgcttaggctgacaagtctccctaactagctaccttagttcaagtccttatcacctcttgcttagtttaacaatacaaaacctggtctctctgcttattttatttatttttttgagacagaatcttgccctatcacccaggcgggagcacagtggcatgatctcagctcactgcaacctccacctcccaggctcaagtgattcttgtgcctcagtctcccgagtagctgagtagctgggattacaggcgtgtgccaccacacccagctatttttttttttatttttaggagagacggggttttgccatgttggccaggctggtctcaaactactgtgatctgccgtctcggcctcccaaagtgctgaaattacaggcgtgagacactatacctggcctctgcttcttattaaataccccaacttaaacctagcccactcacattactgccaatgtttctaaaatgaaaatctgacttgaaaactcaacaggctctctcctgcctacagaaaactacttaatataacatacataatctagtacctgtcatttttttttttttttgagacaaagtctcactgtgtcacccaggctggagtgcagtggtgccatcactgctcactcgcagcctccacctcctgggctcaagccatcctcccacctcagccttcccaatagctgggagtacaggtgtacaccacaatgcccagctaatttaaaaaatttttaaaaatttttgttgttttgtttttgtctatgttgcccaggctagtcttgaactcctgggctccagtgatcctcctgccttggcctcgggattataggcatgaaccaccactgtgcctggtcctgccaaattttataaccttatcttccttcattctcttactctcctggaattacttaacagctctcaaaaacaaacaaagaaacaccacaaaaaaattgccttatgctgctccttctgccttgtatgcccttcataccatgactttatagcaatgactatcaagaccaatcaggagcaatgactaccaagaccaattagcctccagatttgtaaagccctccccccattttgggctaacattcattcttttaatcaattaaaaaaaacatttactgactttctactaatgctaggcaccggtaacatggcaatgaacaaagctccagccttcaacattctagtgggggtatgggaagggtgagtgtgtatctccatacaaaatttcaggcagctctaagtgctatggagaaaaactgagcaaggtaagcggatagggagcaacaaaatggggaagagttttttggtagggagtcagatgacatttgacccaatcatctggggaaaagagagaagagcaagtagaaagatattgaggcaagaatgcgcttggtagttttcagaggaacaccaaggttggagaatgagctaaaaagagaccacaaggagatggtgtcaagagataggatggaatcaattcatgttggaccttctgggttatgctaagtttggattttattcaagtgggatggggagctctggaaggccttggtgggggattgacataatcctcctggctattatgagaatgggctgtaatgggacaagaatagagatgcaagactaattaagagactactaaaatacctaggtgaaagtttatagtggttcctactttagcggtagtggaagcagcagtcagagtccaaatttctagaggaagagccttgctgaggtactggacatggagtgtgaaagaaaaccaaggatattccttgtatcttgtaagtataagttatttactacctggtattacaattatttgtttaccagtctgtatggggtcctttttcttctaagttggaagcagtcaattatagccttactttttgcatacatgagacttaattatagataagaccactttttcaagtccattttttttcaatttgagttaccgtattttgcaagctttagaactaagtttggaagtaaaaagagaaatctctaggaaaatggacatgtcttatggaacaattttaacggtaacagctgctaaatttactaagcacacactatgtaccaagaactgtttttgagtttcacagcaattgtctcttaattctcaaaagccacaatgcactattatcgccattttatagatgaggaaattgaggtcacacagccagtaagtggaggggccagggaccctgtactggctgtggagccctcactctaaaccaatactcttaaggtgcctcccattcctagactgtgagctccatgagggcaggtaattagccatactcattcttgtatccttggttatgtttttaggcaacataaatatttactgaatcaatgaatgatttctctgattgttatcatatggcagcaaaaactaggtatctgggaaaccgactgtaaacaacatgctttactgttttattgaacaaaatttattcttgggtatgtaatctactcggattcaggctgtggaagctacatgtcataaggtcccaagggaaggtcacaaaggagtagggcgggtatagaagacagcaaaaccaatttctagtttagttagaatacgttacttatcctgctaaaatcttggtcattaggtgacatgagagcgttcctggcagttacaggaacaagtgtcttgtctgaaagagggtttaagtgtcccaaaattatcggaaagaaatttctgacctaaagctaagggggtgggggcaggaatcgggaaataaaaggtagtgaaaacaaagacgaaagggagcattatcctcacacttaccctggacctaggaaggctgcattcttcagagagggggctgcagatagacaaggcgaaggtcagcaaagtcaaatgaaatctggtttgccctttccttacccccgccaggctctatcactaagcctatgtacccctctttcccgtccctcaagaccccacgctcccttccgaactgcactgaccactcgcctctcaggcccgtgtcgctgcgcccttctcccctccctgtcacccctagattcgcttctttccaatcactctgatagtccagagcagggtctataccccttacccgctgtggcggcggcggaaagtaccacccgggacagcatggtcaacgaaagtccaggtagcaatcttagcgtccctgtgaccccgataggagaatctgtcagggcagaaccaagatggccgctcacaagtctcgcgagatgaaaattttgtactcttccttcaactttccttgggagatttttaaaaaaaattatcgcgagaagagtcaagtaacgctgagagcctatcgcatgagggcgacagccggaaagcaggatggagccatagaagcaattctcgcgagaagtagagttgcggttccctcgggagaggggcggaggctcagaggtgcaccacgtggggtttgctgccggagctgagtctccggccggcgtccagtttgagtctaggttggagttggaaccgtggagatgcgaaaggaaaacccaccccccctagtgcccccggcggcccgggagtggaatcttcccccaaatgcgcccgcctgcatggaacggcagttggaggctgcgcggtaccggtccggtgagccgagatccgaggcgtgggagctcccttaccccgcccagggcgcccctccccgcagactgaccctatcagcacatccccgccctgcatgttatcctgacccttggttgtgtcaccgagctgtcctcagccctgcacggcgttcttgagctcagatccagaccccgaaggacacgctgttctgtgcggtttccatgtaggtgagcccttctacccttcgcgaggtgccagcttgtagcccccgtaaatgaggcgcttctccttagggcctccagcttgagtgggtgaggctgggccggctccctccggctttttatgtacccctgtaccgcccccaactaaggcttctgctccgcggtagtccaaacggaggctggagtgactgacctcacttgggttggggagagaggtattctagtggcctccgattcaggtgagtctctatcccattatccacccccacccccgggtggaacggtagaatggagacttggggtaccgtagggttgagctcaatatctaacgtcctatactcagtgctggaggagcctgagagtgttggccccgaatgcaaactcttgtgtaggtgggaaataccttttctaaaattctaaattgtctggtgagatttcctagaaaaatccgtaacaaaattaagcaacggattggaaccatttttcttctgtgtaacctgccccttaacccccacagcccagaccaagcataatcttgattttaagatgacattgaagccaatctgtgctacatgtctcttcccatttcttaccgctttcttgtcttcattctgctttctttttgttgactgttaggcttagcgatgcaggctttggcattttttttttttttaaatcagaatttggaagttggccggcattgcatggaagtttaaagtcccagtttttgatagatttaacctctctgacagttgagcttgaacactacataatcaagacaacttttggcggattctctatacttaaccagtcactgtgcaagacgttcaattattcaacatatttttaaagactctgcaagacatttattcaactagttcagcaaatacttactagtgtccaaatattggggaagtgttaacatcactggatagtgtgctgcttaaacagttgtggaaacttcatccttgtccccttgcagctcattttccatattctctcactaaaagcagataatgaattttacagactgttccatctttgtctttttctggaagctttctgcacctacttgtctgggctgtcattaggaaaacagtaacgcagaataaagtcaaagactcagaaattagctgaactctccaatgatgtggactttgcttttacaggaataactaacttactttgttaatttagtgacaatggctctttgaatcctagaagtgaattactgccttggtataatccaagctcatgttttccttaccctacccccaacaggtgctgttgaattgtgggaactagatgagaatgagacacttattgtcagcaagttctgcaagtatgagcatgatgacattgtgtctacagtcagtgtcttgagctctggcacacaagctgtcagtggtagcaaagacatctggtgggtccctgttctcattgctcctgtctctaagcctcctgtgggtgcctttcctatcctgttaacctcattaggtaacattttgggcttattctaagaatccagtgacttattttagcatgtctataaggtttccttagggattttgcagtccatcgtaagtagaccatagcagcagtccaagaggcaaagacttggggaatgttgattacaggaagttcttgtttgaacacgtttttatgttgatagtgtaggtcaagattaaatgtctgtttgcttttgcttcttagcatcaaggtttgggaccttgctcagcaggtggtactgagttcataccgaggtgagtattctttcatttttagccctggtgttagctgttgtgtttttggactttttgaactttgctttgatgttaggagcagcaattccatgttctgatagttttcttgtaaaacaatagtcaggctccggtatctactccttgtccttttctcaatttccttgtttctttctttctttttttttaattcgactagtcaagtgcagtagtgaaaagggaggaaagaatagaacaaggagtttaatctgtaactgactgaacaatcaactgagataactcactaccttcagaccagccagtttccctgtttctattgatggcctcaccaccttggcaacacagggctcaaactcggtccttttccacctcttctgttttcccaccatcggttggccactaagttctttttagtcttttccactggtcagtcaccttcctgtccatttctatgcccgtattcactttcaggctttaccttacacaggcagtggcactcatctctccactagcaatctagctcttttggtcttttattagtttcttgtggcctgtggattaaaatcccattttcttgtcatggcattgaagcccttttactccatttcctctcttcaagcttactagatccttgacattcttgagggataaatcttgagacttttaaatcttgaacttttgagtatttaccttcataaaatgtctgttttctggtgagaaccattacttttttaatgcccctctttctgctcactttcattaacagcactagtagttaactttatcttgggagccattctttgtgaagataatgtctagagccttaatgtgtacatggttccaaggtttagatgctgggggatcactgtggttctctcaatggctaagtgcctttccctgccatttctaacttcaaagtacatgactaagttataggccagagaaatcactgactcatatccaaggtccagtatcctggaccctcagggtcacttggaaatagttttacaataatgttgaatgcccagctgtgcgcagtggcttaacgcctgtaatcccagcactttgggaggctgaggcgggtggatcatatgaagtctaggagtcagagactagtctggccaacatgccgaaaccttgactctaccaaaaagtacaaaaattagccaggcgtagtggtgcacatctgtaatcccagctacttgggaggctgaggcccgagaagtgcttgaaccctggaggcggaggttgcagtgagtcgagatcacgccactgcactccagcctgggcaacagagtgaaactgtctcagggaaaaaaaaaaagtcaatgttctatgtctattatatttgctttttatttcttagacatatgatgtgctttcctggttaatgctaactctttttcagcatttctgccatgcagcctttttgttagttctttgtgtttgtgtcttattccccctgctgaattccaaatcctttattatttttctattttttgtagagacagagtcttgctatgttgcccaggctggtctcaaattcctgggctcaagtggtctcctgccttggcctcccaaagtgctgagagatacaggcatgagccactgcaccctgccccaaaacctttgagggtagaggaaccatgtattcatcttttgtacaccaccatggtgcttgtcccagagctttgcttttttcaagtgagcaataaattccttttcttacttcttatcctgttggctttctatgaattctagggctaggaaagaactatggaaactggtttaattccatccttctgcctcagggaagggccacattcagactacctgggaaagtctggtaaaatgactgtagaaaaggtttccacagcttctaattaacatgtagcagtgactttaaagttttttacatgtagacctcctaaaacagttttgaaaatctgtgccccctcatacatttttaaactgatacctaaaaatgcttatttaagtagttgcagagaaggtaatttctggcatataatttattgtgtgcttatttcaagcatatatttgtcaaaattttagattcgcaggttaacgctacttagtttgcatgaatgtctaccaaacagcctaactggcaaaagccagtctgcattgtaaagccagtggaccaagatagactaaattttctgtcagaaaaagtctgactttgtttttaaattcagataaagttgttgaatatgtccttatcacaatgatctatcatattttttagttctcattattagacagaaacagagttaagtcacagagccatacttgtgtttgtggtgtgactgaaacaagatcagcccccttcattgaattttacctagatgctctttctttttgctctttggttcttatggaaaagccccttttgtcccttagtttagaacccttatatttttatacccctgagcattgtagcgtggaaagatctgggatgaatgacaggtatgtgttctttctatgaagtgggagaagagtgattgaaaacagaggcagttcaattttaagaaagagaacattagagaaattggctctcttaatactattagcgcccagaactccctcaaaagtttttgtatactacttggaggtgtgtgtactccagtatgaagactgctattctagaattatttagccctcacatctaggatgcctaaactggaaattcctttgttattcttactaagcccctaatttctcattcattatcttcactaatacgttttttttttacaaggctttttaggttttataagtctataaacttctcctcttagcttttgtctaatccataatctcccacaaaatttgttaaattgcatcatgagaccagccctccctccctcctgccccttgattattcctgggctggccctctagtaatgcttcagcttgttttctatcatatttctctttctctctcctttatagctcatgctgctcaggtcacttgtgttgctgcctctcctcacaaggactctgtgtttctttcatgcagcgaggtaagagatagctccttcttccctaaacacactccagccatccataggccaaagtctctagtggggagactttctggcctgcaactgctcctttggattatgaaatcctttttctgttccaccttcctctaggacaatagaattttactctgggatacccgctgtcccaagccagcatcacagattggtgagtctgagattcattggtgggagaatagtacttggaaccctgatagaagagactgtctttggccagtgtcaaagcatagttgctagatgcccagtgtagttactgtgacatgagtgacataatctccttcttttccagtgaggctctgctaaccccattctgtgcaatgaataccaagaggaagggccagttcctgggtgggtgatttactttattagatggtaggacaaaggggccagaattgttatcgtcatgattcgtgcctgaaacttgcctgtgactcgtgtccagaaagggcaggaggctgctgggataaatggttatgaggctcaaggatgaggacactgctgccttagcagggtttgggaaatcaaataaaggtgctcccaggatttagagtgatatcatttgagaaactgcttcttctgtactctgagttttggtccagaccctcgtctctcctttgcaggctgcagtgcgcctggctaccttcctacctcgctggcttggcatcctcagcaaagtgaagtctttgtctttggtaaggcagcgtgtcagacttcatattgactctgggaaaggggaggaggaaaaagaaagagctgactccacaacacacaaggcccttgttgctcagtcttagccctcatggacactagatgaattatgaattgagggtggggaggtggggtgatgccaacgtagttttagtgtagttttggagaacatgattattttcccagtggatttgatttttgattgattgatccagcttctgtattctgggcatggctataagtcagtgatccacaaagcaagtggattgctatatagcgaattctgtccctactgtgggtaggtgtagcgctatcgtggtcatgaggctgtgtatatggtgacatagtttgtggttaaaataataactgcttcgttcattaacttaattttcacaatgatccagtgacttattattcctactttgcaaaagagaaaactgatgctcagaatggttaacttttacaagctcgaggaactaggattcaagtctttggcacaaaagtccatgctcttaatcactatgacatgttccttctcttctacaggtgatgagaatgggacagtctcccttgtggacaccaagagtacaagctgtgtcctgagctcagctgtacactcccagtgtgtcactgggctggtgttctccccacacaggtactgttctttgtcatcaggggcctgatgggtataaatgggaacagtgagggtgtgtgtgtatgttttcaaagcattagctgatgaagtagttccttaaagcagacagtgttctagctgaggtttcggaacatcgaagatctcttaagtgtgaagtagaatcctttgggagtcaaaggatttttcagattagatggtttctgtctgaaatggctaaaatgtgatttcattcctgcccaacacccaaaatggttaatgttgtgggcttctaggactgtgagattggaaaagcctgtgtttctgggttattgctgaagctatagagagggaccagatggggtggttagttgccaggatggttgtcaaccctaactttgcttcatttccctcatctttacttgaaacttttagtgtggacttgtagtagccagattagccaaaagtgggaatcaggctgcctctcctgggtcactttacagtggcggcagggccggcccagttaaggttttgtcttgggatccaggctggacctttcacaaccctctcctccatctgatagtgttcccttcctggcctctctcagtgaagactgctcacttgctgtgctggactcaagcctttctgagttgtaagtgtgaagtggaatcctttgggaatcagggaaggggagcagtgggtgggcgagtcattttcctcttcagaaaactgtgttgtgcttttggagaacagattctccatctgtatccgaagggacttggtaatggaagcaggctggctgttgaccctgtccattcctggggcacattcacaaccccaaggacaagccgtgtccttggtagaggggggtggtaggtgaaatttttaagtctagccctccagcgctctcccacaagggggcggcagtctaccctctcacataaagaactgcgtatgaaatgcagcctgctacagggtaaaaggcagcacctggaagacctgaattgtacttccctccttgccgtgatttgctgcctgttactgcccctcatcactgtcttgttctatccagcatttcttcatctatgaaaatagaagactggattggatgactggtgacatccactgtggatagctacactgctatcctggcgatgaggccatacagttggtgaaatgtgtgtaacacacccaaaaaatgtgccccagatgtgttgggttctctttttttctccaggtctgcttttcttgtctctactctgccccgactttttttctttcttctaggtttagaagccaagcccacagagactttgtgagagatgcgacttggtccccgctcaatcactccctgcttaccacagtgggctgggaccatcaggtcgtccaccacgttgtgcccacagaacctctcccagcccctggacctgcaagtgttactgagtagattggatttaagacaaaaagcaagtcccccatgagtgtccacttctttgccctgccctctcagcttgtgagacaacacaggagccttctatagtatgttgatatgctagatctgtgccgttaataggcatcgtctctcagcctgagggaggctggattctgggttcctgtagtcacagggaggaaaagctttcttaaaaatggacatgtatgtgcgtgtgagtgtgtgtgtagatttatagtttttggtagtggcaggaataaaaaaaatccatcctacatcttccctaagcactgcctctctctcaccccccaaaacaagttgacgaaagggttttatgtagctgtctatgaggaattggccgtgtctgggtgggttatgggatgtgggcatccctgggttcttggaagcagctcttatgctactcatagagatgggattgactttatttttttatagtgcttaattcaccattatgagaaatgcttccagtcacaaaaatgcagcccagctcactctgaggaagaagcaggacttggtacggttttacacaactccttaccattaaactgaatcagaaatccattttctggctgaataaaaagtttggcttgcctgtgtaatgcccactcccttccccctggctccctagtgatgggacatatatgagagagaagtgtttttctatcatagacaccacaggggaaagtttggggatgaaggagagcttaaaggtgtttcaattaagttagaaaactgacacaggctgttgagaattctttgccacttttcccaccccaaaacagcatggggcctgacatcttctgccctggtcccctttctcttgatgtggaaagtctgaatgcagtatttatagacttctaaggttttaaaatccagtatcaagaagaaaatcagaaatactggttggtgaaataaagagtttaggcattgttggcctgtcttttttgaagcatgtgtgttatgtgtagttagatatatttcacttatgtgagtcatcatggtgttggtcttgtagcccattatttttcctgtgcttccccagcttcccaaagtagctagttagaacttaaggtaaatatttattcttgggttggtggagtggatattgccagttaggagtcatggatcaattactgattatattgaaagtaaatataatcaattatgtacttttgagctttgcaggttcaatttaggtaaaaatcacattatgaaactgggaaagtctgaaggaatatgggcaaaatatttctcagtaaagcttccatgcttcacccttgacatgattacccttgagtaaaacatgggaatttgtagttgtgtgatcctctggcgttgatgtggagtaggaataaagtcttgcatcatttttataatgtgggaggaaatagaatgggtaggtacaatcacttaagttctgcctctcgaagataaaactttaattttgtggacacttagagaaagtaaggggtgggggagcttgaggtgagtaggaatttgcatagcccttttcttcctggacttaagaatgatagagaaaaaactcagtgaaagagataaggaagcaaatgtgtggaaatgtgtgataaggaaggaaatgtgtcaaggtggttacaatatggaagggaagcataggttttttttttcttttgttgagatggagtttcactcttgctgcccaggctagtgtgcagtggcatgatcttggctcactgcaaccttcgcctcctgggttcaagcaattctcctgtctcagcctcttgagtagctgggattacaggctaatttttgtgtgtttagtagagacagggtttcaccctgttagccaggctggtctcgaactcctgacctcaggtgatctgcccgccttggcctcccagagtgctgagattacaggcatgagccaccgtgcccgaccagaaagcatggtttttgaaggaccatattttattgtaaaaaaatgttttggttcagatagatgtgtgctgatgggagtaattcacatctatcagtgaccaccaccaagatatttataaaccttatcaaatacagtaggaagagcaaccagcacaattttggataaatgtatatgttgcagtgaacaaagaagatagtttaaaataaaagatgaccacagaataattagaaatggtactgtcacatatggagtgatttgctaggtccttcacttgaggatagttctagtagagtgagtgcagagctgatgacaagttgaaatgagatcaatctatttgtttaaaaatatacaaatattttgcatttaatttcatcggttaaaatgtctaaacattagagtaaacccatttccctatctacatccttactctgaagtccactaatcaaacctactcttccacagctgttctctggtccaccaagggctatgaggctcaccccttggatggtgctcagaaccacaaggaatactgaagaagccttgcctatgatttcaggtggcatcagacattgggctaattttcaaggtgtctctccttcccaacaggacagtcggagtctggttctttcataaatagctatatggatctta

SEQ ID NO: 12989 - DNA, 23936 bp, Homo sapiens
tttttttttttttttttctagatggagtcgaggtctgttgcccaggctggagtgcagtggcgtgatctcagctcactgcaacctttgcctcctgcgttcaagcaattctcctgcctcagcctcctgagtagctgggattacaggcgcctgccaccatgcccggctaaccttttgtatttttagtagagacagggtttcactgtgttggcctggctggtttcaaactcctgacctcaagtgatccgcctgtctcggccttccaaagtgcaggcattacaggtgtgagccactgtgcctggcctgctgcatggattcttaagagtgattttatgacactctgagtccataatattttctataggcatactactaaaataataaagtcaatgatatgaattgatatataatactccatttagttattttaagagtactagaaagctttacatatctcataacctatcagccagaaacagttcaccactgaatggtctcataaacaagacagtagttcaatgacatctttaatttttacccatatgacaaaagctgagtatttcagagaattatacaacttgaaaaaccctgtttcattcaattgtcactttattgcaagatggtagaattaattacaaatttaaactataacctgttaatctttagtcaggcagcaagtttttataaaggcaaactgcttattcagaagtgatcacggaacaactcaaaggcagagcaagaaggatgagaaacatctgactggccgatagagatttcgttctctcactatatgaaacaaacttttcatttttaggaagggtaaactataacttcagtagacaccaacacagaaagactttgtcaaatagactagtttccatttagtcagtcaactgtttctagctgtctcaattgggatagatacatttacataactggctgtgcttgagccttctttgccagcagctttaggtccgcaatgcacttggcaattgtctccttttcctgtgataaggaaagagaaatctggttagacctttccaaaacatagaaaagtatagagtataaacaccattattctaaaagacacctcctaccagaccagaacctcaagatgattactggcttaacactatacagctactagacaggtttagaagtaaaattaattaacacagaggagatataatttattttaagcaaatccagggggttagttaaaattccctggctcacagcctttatgggtgaaacctgtatagaatttgaggccagatattcctgtaaccatctgccactgatgttggcttgtacaaccaacagttgcttgaaaaagaccaattcaacaaatattagtaatatataaatgttaagaatgaaaataatttttaatctcttttctagacttcttttgtattttctaagtttcttaagtaagcatatatattacttttatgtaaaagtttatcaaaaaaaaaaaaaaaactttgatagacactgtttttctaatcctgtataggttatgctgaaaacaaccagaaatacttaaatgttataaactcgagaaagaaaaaaaaaatcaagtcatattaaagcaaaaatataaatgaaaaaaaattaattcagtttaagcaaatagaaaacatttccgttcaaaacagacaagttatgcaggtgaaaagaagaaatggaatgtcatggaattagaaaatggaaggggcttagaaatagccttgttcagtcttttatttattttttgaggcagggtctcgctctctcacccaggctggagtgcaatactgcaatcacagctcactacagcctatgcttcctgggctcaagagatcctgtcacctcagcctcctgagtagctgaactacaggcgtttgtcaccgcacccagctactttttaaattttttgtagagacaggatctcgctatgttgcccaggttggtcttgaactcctggcctcaagtgatcctcctgcctcgcccttccaaagtgttgggattacaggtgtgagccaccgtgcccagcccagtctattttatagagaaattaaatatatcagttaatgttacccaaatttaaggaaagagaaaagccatcctgacaggtatgcagcatcttcctgcttatcactatccagaaaaacaaaccggggttacactgctacttctaggctaaagactccttgccagctattcctaccttaacaaaacatcagcagatacttgttaagagataccagtacaacatcagaacctacaaaaatgttgtgtacctgctgtgtggagatgctttgcaccacgtgcttctccacccaatttatcatgtgttcttgttcctttcgacgcatcatgttctgcacagatatatgatagtccaggcgattctttacttccttatatactctatacagtcgttcccggtaagtaacttccaaagccatagcaatgttattctggggcaaaattaagaaatgataaatattgtttgtatacttgaaggaatacttctactctgaagattctgccagtgagaatgcccacttcttttgtattttacgtgaaattcttttatttaataggtaatatgtacctagaaattataacagcatatggcaaaaacatatttaaaagtgatgctgtatgaaataagtctccttcagcctcccccataggccattaacttcctgtatttcttgtattccctcccagaaatatttaataaaaatataggtatacccatcaaaatataggcatatacacatcacttttattaattatgacacacaaacctacctcaattttaagttacactggattccactatactggtattctataattcattttttggtactacaaataatggtgcatacattgtagatttgtctttgtgtttatgtcataatacttgctggatcaaataatagttaacatttgtagagtactgactacactctaaacactcttgtgtttagattcaattaaaccttgtaaccaaaccatggcatagttattataattgtatccattttgcagtgaggaaactgaggcagaaattaggaaacttgcccaaggttacagagctaataaactgtgaagccaagatcagcatacaggcagtaaggctacataaggccaagctcttacatatctctacttggctaacccataggcatcacaaaccaatgcataccaaactgaaggctattggcaacaaggcaatcagaatgatccttcaatgactttctctcattcagagtccaagtcaaagttcttataggagcctaaggtctttatatatcacagtcccaggcctccctctatctccttttattctcccccgaccaattctacttcagctgtatgggccttcttacttttccttgactgtatcaagcaaacttccaggtttagggcatttgcaactgttcttccctcagcctggaacttatttccccaaaaatccacatactttgcactattagttctttcaggtgtctgctcaaatatcatattagagacatttcttgaatgccctataaaaacagtgactccctcctcctgcaattttgtagaaagggggtctatgttgcccaggctggtctcaaattcctgggctcaagtgatcctcccgccttggcctcccaaagtgctgagattataggcatgagccaatgcgcctggcctgcaatctttttaatactagtttatttttctatctggcatttattacctgttgacatttgcatctgttcaattatttattttctgtgcttctcccaaaggctggctagaaaataagactccatgaaggcagaagctttttgttctccactatattttcagcactctgccttgatcagaatatctacacaggaagaactcaataaatatctatcaagtaaatgtaaataaataaaaacctaaattactatcatttgactcttaggaaaaagctacattttccaatatggttttttaaaaaagccaaaatatatgtatgcatgcattcacgtgtgtgtatatactatgcaagaagcaggaagcattctccctttgtaacctaaatatacatggaattaacattttctgagattttcaaatatccatgtgcttaagagtctttagggatcttgtttaaaataatacagattctggatagcccctaagaaaggttctgattccataagtcttggaaagggacaaaaaaattaacaccaaagataactctaatccatgtggtaccaagaccacattggccaagatcctaaacatttcagatgcttagtatcttggccaatattgagaaatattggccaagatcctaactatttcagatgcttactctaccttagcatctcatttttcatttcattttaatataaaacttcaacataacagcacctcacttttaaatattagccataaagtacaaggctcaaaataaaaacagtaataacaaaatacttgaacatattcctaaagattgttttggaagctgcatattttagaatctaatcatgttctgaccatgataaaaagctctactgctatctgaatttgttgtttgtgtgtgtgtgtgtgtgtgtgtgtgtgtttgagagagtcttgctctgttgcctaggctgaagtgcagtggtgggatcacagctaactccagccttgacctcctgggtgcaagcagtcctgctgcctcaccctcctcaagtcctaggattacaggtgtgagccactgtgccctgcctgctttgtggatttagaatgtacagtatcagatttccttacagcaaagatgttaagatgttcttgcagcaagtgtgtatgaaatacacaggatgtattttacctagtcttccttacacagtgcatgccatttttaaatcagctttaacttaatgactatttcattttgtgtggatccaaaattttttttaatagcttctatagattctaattttataataatttgaactatttttccacttgacagttcttaaatgtttgaatagccgtgaatgccaactcctacacaaatcttctcttttctaaataaaatacgttcaatctatttaaccattcttcataaaaaattctgaattaaaaaaatgcacacaacaagtaacttcattcttcctagaaacttctgaaacctaccctttgcacatcaaaaaggtaatggcgcttctgaaccagtgcctgttgtgacttctccgtatcaattgcattctggatgtgttggatggaagcctgcttcgcctcttctagttgggcaagtttttgctacaattgtgatagcaacaacaaagatcagtgaaagcacaaagggtaaaaaaaggagattcatttcatgcttcttcaaagttgtatatctcatttgtaaaaacacccacaaagaaacatagaaagaaacgcacaaatccttaaaaagaattgcccataataactatagaatatcttttgaatgattaaactatagaaaagctaaagtgtttagtagatataaaaaaattatctcaaattagtaactaacgttaacacttatttgaagcattagattcatttctatatgttgctcccctaacactcatatcaaaaatatcactagatgaccttcatgtttctgctagtctaaaataggaaataaagtttatggttcttacctcattgagtttatcagcaaagtctgcaacaaagggaccatattttttaattccatagaccattacacctagtactgatagggcagtgaaggtctctgcgctaatcacatatatttctttggataaagcgtacaagataagcccagttccgagtacatagggtcctaaaagaagaaagagttattttatgaagggatatgctatgcctaaaagagggaagatagaaaggtacttctatatttgattagctgaaggcaaagtaatgacttaattagattcaaagacaaaacactggattgggaagcagtatggtagagttgaaagaacaaagatatggactcagggaaatctgtatactgactctacaattttaaagaaactgagcaatctaaataatctctgaatttagttccttatttgtaaaatggggacagtaccttcttcagtctgataaatttgagaaataatgttaagcacaataccccgcacagtaaattaaactattctacaaagatgtcagataactttctgaagtaatttgtccagcaaaatatactatttatcgaatgggacactagaccggataaaatttacacaagaaacaagcaaaaaacaactacaaagtgatatgtatataaaaggatgaataaatattaggattctcaattcctgtagcacctaattacaatgcttcaaatatggctttttctttaaccaggccatgtgttctgaaaggatgcaaaccatgatttacatttatttagtctttcctccgcgcctcacaggatgtaagggaggcccagagcaggcttttaggaaagcattttacagtatttctgagaatcataggatggcaggatgtatcataagaacaacagggttacaaactcaaatacattttacctggtttcccatacaaagttccaacagttttttttaactgcctttaatatacaaattttaaatatgaatttgcaagaaacatctatcatatgtaacattgttatcacctatggacgtctgaggagactaatgtttctagcaatttcagttaggaaaatgctactttaggtgactccagggctaaaaaaaaaacaatcttcggtttccaatgttccagtcatagcaatacttgggtatgggccaagaaaggcagtacatgtagtagagagaatcataaacttaatcaggggactcttgccttacatggcttcatttttattcgtacccttttcattacctaacagtatattatacagttactcatttctttattgtcatcctacaacagaatgtatgttccaggacagcaggcacttaacactgttcaacactgtatgactgcaacagtgcctggcataaagcaggcatcaaaaaatttgatctactaacaaacagagataatgctgtaaaattaagttaaaatcccaaataaatttataccaaagacaagttggagcaatcaaatcaattgttacaatttccttttaaaaatagctgacttgcggctgcaggcgggtggctcaagcctgtaatcccagcactttgggaggccaagatgggtggatcccacaagcccaggagttggagaccagcctgggctacatggtgaaagcccgtctctacaaaaaaatagaaaaatgagccgggtgcacgccaagtcccagctactcgggaggctgaggtgggaggatgacctgagcctggggaggtggaggctgcagtgagctgtgatctatcactccatcctgggtgatagagtaataccctgtctcaaaaaacaacaacaacaacaacaacaacaacaacaaaaaccaaagaagaaaacccacctaacttgattttagtggtgccatcaaaacatattaccagagactaggcaaaaatgctcacctgttacaccagttttaggataaagaaactggaagaattcctcagggatcagtccataacgaacttttcctccgtattcaggaagaggtggtacagggacaaggtgtggctgccctgtatgaaaggtccttgttgcctgcaataccctacaggtagtaattgtacaaatgtaaagcctgtttctttaaggagaatacagtgtatgaataatgagcagaaacaataaatagggttgataattgaggcagttttctaactctcataatggaaagagaatggactgggaatgggaaggttagggtccagtaatcagctgtgacaacagcaaagaattaatcacagacatttaaccttctacccaatactggaatcccttctatcagccttgcagatcatctgtctagcactttgtatgtctatcattagcactgaaatatgtaagaatgtggacgtggcggtcagataggcatcttgagttcaaatcctagacctgctccttgactttgagtaaagaacttaagcttttgtaatctcagatttctctcagtaaaatggaaatagaagataataccttatatggttgttgagaggattaattgagttaatatatgtgacgtgcttagaatgatgcctggcacatggaaaagttctacgtaagtggttagctattatatgcctgatatgttgtaagctcctggacctttttgaatactctctttgatgagagtgctaaacactatatgtaacagactttttcagtactgggtagctctaattatgttcatctttgaattgagatgatacatacattcttggaacctcaatccattcttagttctaattttgcttttctatgtaagataacacacatgtacctgggtcaaacatctgttccctcacaatcctgattgcccgtaaggacttctctggttttatcttttttttttttttttaatgaggtatacagaactgaatataatactttaagtatagtctggccaatttattcatcctacaaatacttattgagaacttactattgccagtactgagcttgaacaattgaactattatcaacagtggatttggaaactattcttgtattaaagcagcttaagactacacttttaacagttacagcatactgatgtctccttaagcttctgatgaaataaaatctagtccctttatatctgctgtcatttagtctccttcaagttttcagtgtatttctgtcccacttcctaccctccattcctccaatctctcaacttctatctccttgtaatataagaatttacattatttcatttattttggtacaatgcttatcttttgaatattatttctgcctccaaatatattagctaccccaccaggttttgaaatctgagaatcatgcttgagattccttcatttacatcaaggtttctcaattcagcactaccgacgtttgaactggatatttctttgttgtaagaggttgttctgtgcattgtagaatgtctggcagtatctttgtggcctttatacaataggtaccagtagcccctccctccccgacccatcctatggtaacactgaaaaatatctccagacattgctaaatgtcacctgcaggcaaaccaccccaggctaagaagcactgatttaaatcatagcactaaatggtatgcttaggctgacaagtctccctaactagctaccttagttcaagtccttatcacctcttgcttagtttaacaatacaaaacctggtctctctgcttattttatttatttttttgagacagaatcttgccctatcacccaggcgggagcacagtggcatgatctcagctcactgcaacctccacctcccaggctcaagtgattcttgtgcctcagtctcccgagtagctgagtagctgggattacaggcgtgtgccaccacacccagctatttttttttttatttttaggagagacggggttttgccatgttggccaggctggtctcaaactactgtgatctgccgtctcggcctcccaaagtgctgaaattacaggcgtgagacactatacctggcctctgcttcttattaaataccccaacttaaacctagcccactcacattactgccaatgtttctaaaatgaaaatctgacttgaaaactcaacaggctctctcctgcctacagaaaactacttaatataacatacataatctagtacctgtcatttttttttttttttgagacaaagtctcactgtgtcacccaggctggagtgcagtggtgccatcactgctcactcgcagcctccacctcctgggctcaagccatcctcccacctcagccttcccaatagctgggagtacaggtgtacaccacaatgcccagctaatttaaaaaatttttaaaaatttttgttgttttgtttttgtctatgttgcccaggctagtcttgaactcctgggctccagtgatcctcctgccttggcctcgggattataggcatgaaccaccactgtgcctggtcctgccaaattttataaccttatcttccttcattctcttactctcctggaattacttaacagctctcaaaaacaaacaaagaaacaccacaaaaaaattgccttatgctgctccttctgccttgtatgcccttcataccatgactttatagcaatgactatcaagaccaatcaggagcaatgactaccaagaccaattagcctccagatttgtaaagccctccccccattttgggctaacattcattcttttaatcaattaaaaaaaacatttactgactttctactaatgctaggcaccggtaacatggcaatgaacaaagctccagccttcaacattctagtgggggtatgggaagggtgagtgtgtatctccatacaaaatttcaggcagctctaagtgctatggagaaaaactgagcaaggtaagcggatagggagcaacaaaatggggaagagttttttggtagggagtcagatgacatttgacccaatcatctggggaaaagagagaagagcaagtagaaagatattgaggcaagaatgcgcttggtagttttcagaggaacaccaaggttggagaatgagctaaaaagagaccacaaggagatggtgtcaagagataggatggaatcaattcatgttggaccttctgggttatgctaagtttggattttattcaagtgggatggggagctctggaaggccttggtgggggattgacataatcctcctggctattatgagaatgggctgtaatgggacaagaatagagatgcaagactaattaagagactactaaaatacctaggtgaaagtttatagtggttcctactttagcggtagtggaagcagcagtcagagtccaaatttctagaggaagagccttgctgaggtactggacatggagtgtgaaagaaaaccaaggatattccttgtatcttgtaagtataagttatttactacctggtattacaattatttgtttaccagtctgtatggggtcctttttcttctaagttggaagcagtcaattatagccttactttttgcatacatgagacttaattatagataagaccactttttcaagtccattttttttcaatttgagttaccgtattttgcaagctttagaactaagtttggaagtaaaaagagaaatctctaggaaaatggacatgtcttatggaacaattttaacggtaacagctgctaaatttactaagcacacgctatgtaccaagaactgtttttgagtttcacagcaattgtctcttaattctcaaaagccacaatgcactattatcgccattttatagatgaggaaattgaggtcacacagccagtaagtggaggggccagggaccctgtactggctgtggagccctcactctaaaccaatactcttaaggtgcctcccattcctagactgtgagctccatgagggcaggtaattagccatactcattcttgtatccttggttatgtttttaggcaacataaatatttactgaatcaatgaatgatttctctgattgttatcatatggcagcaaaaactaggtatctgggaaaccgactgtaaacaacatgctttactgttttattgaacaaaatttattcttgggtatgtcatctactcggattcaggctgtggaagctacatgtcataaggtcccaagggaaggtcacaaaggagtagggcgggtatagaagacagcaaaaccaatttctagtttagttagaatacgttacttatcctgctaaaatcttggtcattaggtgacatgagagcgttcctggcagttacaggaacaagtgtcttgtctgaaagagggtttaagtgtcccaaaattatcggaaagaaatttctgacctaaagctaagggggtgggggcaggaatcgggaaataaaaggtagtgaaaacaaagacgaaagggagcattatcctcacacttaccctggacctaggaaggctgcattcttcagagagggggctgcagatagacaaggcgaaggtcagcaaagtcaaatgaaatctggtttgccctttccttacccccgccaggctctatcactaagcctatgtacccctctttcccgtccctcaagaccccacgctcccttccgaactgcactgaccactcgcctctcaggcccgtgtcgctgcgcccttctcccctccctgtcacccctagattcgcttctttccaatcactctgatagtccagagcagggtctataccccttacccgctgtggcggcggcggaaagtaccacccgggacagcatggtcaacgaaagtccaggtagcaatcttagcgtccctgtgaccccgataggagaatctgtcagggcaggaccaagatggccgctcacaagtctcgcgagatgaaaattttgtactcttccttcaactttccttgggagatttttaaaaaaaattatcgcgagaagagtcaagtaacgctgagagcctatcgcatgagggcgacagccggaaagcaggatggagccatagaagcaattctcgcgagaagtagagttgcggttccctcgggagaggggcggaggctcagaggtgcaccacgtggggtttgctgccggagcggagtctccggccggcgtccagtttgagtctaggttggagttggaaccgtggagatgcggaaggaaaccccaccccccctagtgcccccggcggcccgggagtggaatcttcccccaaatgcgcccgcctgcatggaacggcagttggaggctgcgcggtaccggtccggtgagccgagatcccgggcctgggagctcccttaccccggcccagggcgcccctccccggagactgaccctcccagcccatccccgccctgcatgttatcctgaccctgggtcgcgtcaccgagctgtccccagccctgccccgcgttcctgagctcagatccagacccggccggaacgctgttctgtgcggtctccatggaggcgaacccttctacccttcacgcgctgacagcttgtaccccccgtagatggggcgcttctcctcggggcctccagcctgagtgggcgctgctgggccggctccctctggctttttaaggacccctgtgccgcccccaacgaaggcttctgctccgccggagtccaaacggaggctggagtggctgacctcacttgggttggggagagaggtattctagtggcctccgattcaggtgagtcactatcccattatccacccccacccccgggtggaacggtagaatggagacttggggtaccgtagggttgagctcaatatctaacgtcctatactcagtgcttggaggagcctgagagtgttggccccgaatgcaaactcttgtgtaggtgggaaataccttttctaaaattctaaattgtctggtgagatttcctagaaaaatccgtaacaaaattaagcaacggattggaaccatttttcttctgtgtaacctgccccttaacccccacagcccagaccaagcataatcttgattttaagatgacattgaagccaatctgtgctacatgtctcttcccatttcttaccgctttcttgtcttcattctgctttctttttgttgactgttaggcttagcgatgcaggctttggcattttttttttttttaaatcagaatttggaagttggccggcattgcatggaagtttaaagtcccagtttttgatagatttaacctctctgacagttgagcttgaacactacataatcaagacaacttttggcggattctctatacttaaccagtcactgtgcaagacgttcaattattcaacatatttttaaagactctgcaagacatttattcaactagttcagcaaatacttactagtgtccaaatattggggaagtgttaacatcactggatagtgtgctgcttaaacagttgtggaaacttcatccttgtccccttgcagctcattttccatattctctcactaaaagcagataatgaattttacagactgttccatctttgtctttttctggaagctttctgcacctacttgtctgggctgtcattaggaaaacagtaacgcagaataaagtcaaagactcagaaattagctgaactctccaatgatgtggactttgcttttacaggaataactaacttactttgttaatttagtgacaatggctctttgaatcctagaagtgaattactgccttggtataatccaagctcatgttttccttaccctacccccaacaggtgctgttgaattgtgggaactagatgagaatgagacacttattgtcagcaagttctgcaagtatgagcatgatgacattgtgtctacagtcagtgtcttgagctctggcacacaagctgtcagtggtagcaaagacatctggtgggtccctgttctcattgctcctgtctctaagcctcctgtgggtgcctttcctatcctgttaacctcattaggtaacattttgggcttattctaagaatccagtgacttattttagcatgtctataaggtttccttagggattttgcagtccatcgtaagtagaccatagcagcagtccaagaggcaaagacttggggaatgttgattacaggaagttcttgtttgaacacgtttttatgttgatagtgtaggtcaagattaaatgtctgtttgcttttgcttcttagcatcaaggtttgggaccttgctcagcaggtggtactgagttcataccgaggtgagtattctttcatttttagccctggtgttagctgttgtgtttttggactttttgaactttgctttgatgttaggagcagcaattccatgttctgatagttttcttgtaaaacaatagtcaggctccggtatctactccttgtccttttctcaatttccttgtttctttctttctttttttttaattcgactagtcaagtgcagtagtgaaaagggaggaaagaatagaacaaggagtttaatctgtaactgactgaacaatcaactgagataactcactaccttcagaccagccagtttccctgtttctattgatggcctcaccaccttggcaacacagggctcaaactcggtccttttccacctcttctgttttcccaccatcggttggccactaagttctttttagtcttttccactggtcagtcaccttcctgtccatttctatgcccgtattcactttcaggctttaccttacacaggcagtggcactcatctctccactagcaatctagctcttttggtcttttattagtttcttgtggcctgtggattaaaatcccattttcttgtcatggcattgaagcccttttactccatttcctctcttcaagcttactagatccttgacattcttgagggataaatcttgagacttttaaatcttgaacttttgagtatttaccttcataaaatgtctgttttctggtgagaaccattacttttttaatgcccctctttctgctcactttcattaacagcactagtagttaactttatcttgggagccattctttgtgaagataatgtctagagccttaatgtgtacatggttccaaggtttagatgctgggggatcactgtggttctctcaatggctaagtgcctttccctgccatttctaacttcaaagtacatgactaagttataggccagagaaatcactgactcatatccaaggtccagtatcctggaccctcagggtcacttggaaatagttttacaataatgttgaatgcccagctgtgcgcagtggcttaacgcctgtaatcccagcactttgggaggctgaggcgggtggatcatatgaagtctaggagtcagagactagtctggccaacatgccgaaaccttgactctaccaaaaagtacaaaaattagccaggcgtagtggtgcacatctgtaatcccagctacttgggaggctgaggcccgagaagtgcttgaaccctggaggcggaggttgcagtgagtcgagatcacgccactgcactccagcctgggcaacagagtgaaactgtctcagggaaaaaaaaaaagtcaatgttctatgtctattatatttgctttttatttcttagacatatgatgtgctttcctggttaatgctaactctttttcagcatttctgccatgcagcctttttgttagttctttgtgtttgtgtcttattccccctgctgaattccaaatcctttattatttttctattttttgtagagacagagtcttgctatgttgcccaggctggtctcaaattcctgggctcaagtggtctcctgccttggcctcccaaagtgctgagagatacaggcatgagccactgcaccctgccccaaaacctttgagggtagaggaaccatgtattcatcttttgtacaccaccatggtgcttgtcccagagctttgcttttttcaagtgagcaataaattccttttcttacttcttatcctgttggctttctatgaattctagggctaggaaagaactatggaaactggtttaattccatccttctgcctcagggaagggccacattcagactacctgggaaagtctggtaaaatgactgtagaaaaggtttccacagcttctaattaacatgtagcagtgactttaaagttttttacatgtagacctcctaaaacagttttgaaaatctgtgccccctcatacatttttaaactgatacctaaaaatgcttatttaagtagttgcagagaaggtaatttctggcatataatttattgtgtgcttatttcaagcatatatttgtcaaaattttagattcgcaggttaacgctacttagtttgcatgaatgtctaccaaacagcctaactggcaaaagccagtctgcattgtaaagccagtggaccaagatagactaaattttctgtcagaaaaagtctgactttgtttttaaattcagataaagttgttgaatatgtccttatcacaatgatctatcatattttttagttctcattattagacagaaacagagttaagtcacagagccatacttgtgtttgtggtgtgactgaaacaagatcagcccccttcattgaattttacctagatgctctttctttttgctctttggttcttatggaaaagccccttttgtcccttagtttagaacccttatatttttatacccctgagcattgtagcgtggaaagatctgggatgaatgacaggtatgtgttctttctatgaagtgggagaagagtgattgaaaacagaggcagttcaattttaagaaagagaacattagagaaattggctctcttaatactattagcgcccagaactccctcaaaagtttttgtatactacttggaggtgtgtgtactccagtatgaagactgctattctagaattatttagccctcacgtctaggatgcctaaactggaaattcctttgttattcttactaagcccctaatttctcattcattatcttcactaatacgttttttttttacaaggctttttaggttttataagtctataaacttctcctcttagcttttgtctaatccataatctcccacaaaatttgttaaattgcatcatgagaccagccctccctccctcctgccccttgattattcctgggctggccctctagtaatgcttcagcttgttttctatcatatttctctttctctctcctttatagctcatgctgctcaggtcacttgtgttgctgcctctcctcacaaggactctgtgtttctttcatgcagcgaggtaagagatagctccttcttccctaaacacactccagccatccataggccaaagtctctagtggggagactttctggcctgcaactgctcctttggattatgaaatcctttttctgttccaccttcctctaggacaatagaattttactctgggatacccgctgtcccaagccagcatcacagattggtgagtctgagattcattggtgggagaatagtacttggaaccctgatagaagagactgtctttggccagtgtcaaagcatagttgctagatgcccagtgtagttactgtgacatgagtgacataatctccttcttttccagtgaggctctgctaaccccattctgtgcaatgaataccaagaggaagggccagttcctgggtgggtgatttactttattagatggtaggacaaaggggccagaattgttatcgtcatgattcgtgcctgaaacttgcctgtgactcgtgtccagaaagggcaggaggctgctgggataaatggttatgaggctcaaggatgaggacactgctgccttagcagggtttgggaaatcaaataaaggtgctcccaggatttagagtgatatcatttgagaaactgcttcttctgtactctgagttttggtccagaccctcgtctctcctttgcaggctgcagtgcgcctggctaccttcctacctcgctggcttggcatcctcagcaaagtgaagtctttgtctttggtaaggcagcgtgtcagacttcatattgactctgggaaaggggaggaggaaaaagaaagagctgactccacaacacacaaggcccttgttgctcagtcttagccctcatggacactagatgaattatgaattgagggtggggaggtggggtgatgccaacgtagttttagtgtagttttggagaacatgattattttcccagtggatttgatttttgattgattgatccagcttctgtattctgggcatggctataagtcagtgatccacaaagcaagtggattgctatatagcgaattctgtcctactgtgggtaggtgtagcgctatcgtggtcatgaggctgtgtatatggtgacatagtttgtggttaaaataataactgcttcgttcattaacttaattttcacaatgatccagtgacttattattcctactttgcaaaagagaaaactgatgctcagaatggttaacttttacaagctcgaggaactaggattcaagtctttggcacaaaagtccatgctcttaatcactatgacatgttccttctcttctacaggtgatgagaatgggacagtctcccttgtggacaccaagagtacaagctgtgtcctgagctcagctgtacactcccagtgtgtcactgggctggtgttctccccacacaggtactgttctttgtcatcaggggcctgatgggtataaatgggaaccgtgagggtgtgtgtgtatgttttcaaagcattagctgatgaagtagttccttaaagcagacagtgttctagctgaggtttcggaacatcgaagatctcttaagtgtgaagtagaatcctttgggagtcaaaggatttttcagattagatggtttctgtctgaaatggctaaaatgtgatttcattcctgcccaacacccaaaatggttaatgttgtgggcttctaggactgtgagattggaaaagcctgtgtttctgggttattgctgaagctatagagagggaccagatggggtggttagttgccaggatggttgtcaaccctaactttgcttcatttccctcatctttacttgaaacttttagtgtggacttgtagtagccagattagccaaaagtgggaatcaggctgcctctcctgggtcactttacagtggcggcagggccggcccagttaaggttttgtcttgggatccaggctggacctttcacaaccctctcctccatctgatagtgttcccttcctggcctctctcagtgaagactgctcacttgctgtgctggactcaagcctttctgagttgtaagtgtgaagtggaatcctttgggaatcagggaaggggagcagtgggtgggcgagtcattttcctcttcagaaaactgtgttgtgcttttggagaacagattctccatctgtatccgaagggacttggtaatggaagcaggctggctgttgaccctgtccattcctggggcacattcacaaccccaaggacaagccgtgtccttggtagaggggggtggtaggtgaaatttttaagtctagccctccagcgctctcccacaagggggcggcagtctaccctctcacataaagaactgcgtatgaaatgcagcctgctacagggtaaaaggcagcacctggaagacctgaattgtacttccctccttgccgtgatttgctgcctgttactgcccctcatcactgtcttgttctatccagcatttcttcatctatgaaaatagaagactggattggatgactgatgacatccactgtggatagctacactgctatcctggcgatgaggccatacagttggtgaaatgtgtgtaacacacccaaaaaatgtgccccagatgtgttgggttctctttttttctccaggtctgcttttcttgtctctactctgccccgactttttttctttcttctaggtttagaagccaagcccacagagactttgtgagagatgcgacttggtccccgctcaatcactccctgcttaccacagtgggctgggaccatcaggtcgtccaccacgttgtgcccacagaacctctcccagcccctggacctgcaagtgttactgagtagattggatttaagacaaaaagcaagtcccccatgagtgtccacttctttgccctgccctctcagcttgtgagacaacacaggagccttctatagtatgttgatatgctagatctgtgccgttaataggcatcgtctctcagcctgagggaggctggattctgggttcctgtagtcacagggaggaaaagctttcttaaaaatggacatgtatgtgcgtgtgagtgtgtgtgtagatttatagtttttggtagtggcaggaataaaaaaaatccatcctacatcttccctaagcactgcctctctctcaccccccaaaacaagttgacgaaagggttttatgtagctgtctatgaggaattggccgtgtctgggtgggttatgggatgtgggcatccctgggttcttggaagcagctcttatgctactcatagagatgggattgactttatttttttatagtgcttaattcaccattatgagaaatgcttccagtcacaaaaatgcagcccagctcactctgaggaagaagcaggacttggtacggttttacacaactccttaccattaaactgaatcagaaatccattttctggctgaataaaaagtttggcttgcctgtgtaatgcccactcccttccccctggctccctagtgatgggacatatatgagagagaagtgtttttctatcatagacaccacaggggaaagtttggggatgaaggagagcttaaaggtgtttcaattaagttagaaaactgacacaggctgttgagaattctttgccacttttcccaccccaaaacagcatggggcctgacatcttctgccctggtcccctttctcttgatgtggaaagtctgaatgcagtatttatagacttctaaggttttaaaatccagtatcaagaagaaaatcagaaatactggttggtgaaataaagagtttaggcattgttggcctgtcttttttgaagcatgtgtgttatgtgtagttagatatatttcacttatgtgagtcatcatggtgttggtcttgtagcccattatttttcctgtgcttccccagcttcccaaagtagctagttagaacttaaggtaaatatttattcttgggttggtggagtggatattgccagttaggagtcatggatcaattactgattatattgaaagtaaatataatcaattatgtacttttgagctttgcaggttcaatttaggtaaaaatcacattatgaaactgggaaagtctgaaggaatatgggcaaaatatttctcagtaaagcttccatgcttcacccttgacatgattacccttgagtaaaacatgggaatttgtagttgtgtgatcctctggcgttgatgtggagtaggaataaagtcttgcatcatttttataatgtgggaggaaatagaatgggtaggtacaatcacttaagttctgcctctcgaagataaaactttaattttgtggacacttagagaaagtaaggggtgggggagcttgaggtgagtaggaatttgcatagcccttttcttcctggacttaagaatgatggagaaaaaactcagtgaaagagataaggaagcaaatgtgtggaaatgtgtgataaggaaggaaatgtgtcaaggtggttacaatatggaagggaagcataggttttttttttcttttgttgagatggagtttcactcttgctgcccaggctagtgtgcagtggcatgatcttggctcactgcaaccttcgcctcctgggttcaagcaattctcctgtctcagcctcttgagtagctgggattacaggctaatttttgtgtgtttagtagagacagggtttcaccctgttagccaggctggtctcgaactcctgacctcaggtgatctgcccgccttggcctcccagagtgctgagattacaggcatgagccaccgtgcccgaccagaaagcatggtttttgaaggaccatattttattgtaaaaaaatgttttggttcagatagatgtgtgctgatgggagtaattcacatctatcagtgaccaccaccaagatatttataaaccttatcaaatacagtaggaagagcaaccagcacaattttggataaatgtatatgttgcagtgaacaaagaagatagtttaaaataaaagatgaccacagaataattagaaatggtactgtcacatatggagtgatttgctacgtccttcacttgaggatagttctagtagagtgagtgcagagctgatgacaagttgaaatgagatcaatctatttgtttaaaaatatacaaatattttgcatttaatttcatcggttaaaatgtctaaacattagagtaaacccatttccctatctacatccttactctgaagtccactaatcaaacctactcttccacagctgttctctggtccaccaagggctatgaggctcaccccttggatggtgctcagaaccacaaggaatactgaagaagccttgcctatgatttcaggtggcatcagacattgggctaattttcaaggtgtctctccttcccaacaggacagtcggagtctggttctttaataaatagctatatggatcttacttactggttcacaatcatattacagcagcaaaaacacccaagctctaactgctctgggcctccagccatgtttcctccagatagcatgttagaaaggacaggagattttaaaaatcagattggacttcagagggctccaaattttcttgccacatctagacctgaaagtaaagagctctgattattaagaggcagattctcgttgcatttggacagcgtgagtaatggtcacactgaacacattagaatcagttgtgaaattgattttgtttcaaaaaaggataagcaagctgtagtctcaattttgagttaattgaaatttctcaagaacttcatcagcagctcacatgatacagttttggaagagtaaacaaggtaagcagacaaccctgggaccccaaacacattttcttttttagttctccatcaaaaataggcatttctggagttttggtctcactgagtgatcacaggactgctgcaatccagggaactgagggagctgtgagcatctgagaagaaaggttagctcttgttttaagttgtagagacaacttaaaacaagttgtgacacaattagtgatcccataatcttttatcatctggtacaacatttaatatagtagcattctacttactgtggaaactccttg

SEQ ID NO: 12990 - DNA, 771 bp, Homo sapiens
taggtgttttataattttttgtttaatcaatttgaaataactgctgatccaatcaaattatctttaagtaacaaagatatcaatctgatttcaatattagattagtacattagctaccaatattgactcaaatgattattacataaaatcttaggaagtcaatgaaaatagcaattacccatgataaatattttcaaatatttcctattgcgtaatttgtccatttgaatacaaataaatccttgtacaagtatgggagaatcaaatgcagataaacctatgaagggaagaattttctaatttatctacaggatttttcttcaatttaaaaaaagattgtaaaatacacataaaatttaccatttttaagtgtaccatttaagaacagtattaaatacatccttaatgtgccaccatcaccactatccagctccataactcatcctgtaaaactgcataacgtcctcaaggttcattcatgctgtagccagtgtcagaattttcttccttgaagtggaataatattccattgcatggatatactacattttgcttatccattcatctactgatggccgattgggctgcttctatgttttagctattgtgaacaatggctgctatcaccatggaacacaagtatctcttcaagaccctgcttttaatttttttgagtatatatgtcgactgggattgctggatcatggtatttccattttaattttatgaggaatcaccacacttttccataatggctgtaccatttcatat

SEQ ID NO: 12991 - DNA, 932 bp, Homo sapiens
tgagtagaactgatgtatgagaccctttaagaccattatccaactgcagtttgcttggcagagttagcattaatgcaccctttgatctaggcacctggaggcaggtaagacaggctctgcgtgcaccaccgtccctggacctgttgtggcggactccttgaagcaagatcaacttgggctttgtttgagtttttaaagtcttttttttttaatgtaaaatttgtcattttaactttttaagtatacagttcagtggcattaagtttatttgcatttttgtgcagctttcaccacttccatctccaaaactttttcatcatcccaaactgaaactgtacttattaaacagtaactccccttcctcaagaccctggcaatcaccattcatcttcatttctataaatttgactattctagacatacgtgtaagtgggagcatacaatatttggtttttttagaggggggttctggcttaattttataaggtgttaacttgttcctcaaaatgtgttctataaactggcagcatttgcatatcttggaacttgcttgaaatacagaatgtccagatctactgagtcagaatttacattttcaaaagcttcctacgtgactcatgcatattaaagtttgggaagcactgacttagattaccttttgagaattccagatgggtcagaaaccagacagaaatactcagtagtgagaagctatggtgtatcagaagctgttaggcatttcatggtttggtagtgagcaagacagatagttttcctgtattcagcgacttagtctagagagagacaggatggaattaagtgtttaggtgctagccaaaagtaaagattcgtagaaaacaagggttcatatcccagtcatcaaagtgataaattttccctgcttaacatttagattaaaaagtaataattag

SEQ ID NO: 12992 - DNA, 4282 bp, Homo sapiens
ctgatggttaattttagacatctacttgactggattgagagacacacatagctggtgaaacacaatttctgggcatatctgtgaaggtgtttctggaagacactgagataaccctgacccagtgtggatgggcactgatatggtttgcctgtgtccccacccagatctcatcttgaattgtagttcctataatccgtacatgtcgtgggagggacccagtgggaggtgattgaatcatggtggttgttactgccattctgttttcatggcagtgagtgagttctcatgatccaatggtttcataaggggctgttcccctttggctcagcacttcttcttgttgctgccatgtgaagaaggacgtctttgtttccccttctgccatgattgtgaggcctctgcagccacgtggaactgtcagcccatttaacctctttgttctttataaattgctcagactcaggtatttcttcacagctgtataaaaatggatgaatacaggcaccatccaattggttgagagcccagatagaataacaaggaagaggaaaggtgaattatctcctgaaattgaaacatccttcttctcctgcccttgacatcagaatcagtgtctcagagctttggcctcagaatcagagttacaccattggcttccctgattctgagtcctttatatctggagtgagtcatgctgccagctttcctggttctccaacttggagacaggctattgtgtaacttctcagcctccataattatgtgaaccaattcccctaatgagtcttctctcatctatctacatatatcctattgattctgcctttctggagaaccctgactaatgttattacaataatacaaaattcactagtttatatagaagacttggtttttgtctttgccccattttgtatttgtattataactgtgtatctggaaaatggaacaagtttttatcttcttcatatgagggccaaagcttttttctcaccaatatttttggagatttttaagattttcttttgtttggacatacaatcttatggaggctgagaaataaaattttttctattttatttttcagccccagatgtttgcttttgcagattcttgagcacattgagagcatggagagcactccaaggcatggagtgggatgcctaaagtttcagtgattacagggagttgagagactcaactgggaaaggaaaagtctaaaaggaggcaatttggaagataaaaattttctcaaaggagcgattaaatttctaaataattcttagtaaaatcatgtaaacaggaaaggaaatagaattagttccatattggtggaacacatagcagaggtttgagaagggagaatttagtcaactgagaagttctcatgaaaggagcaagttgaagatcacagagacaccttgaaacaaaaagccaggaataacttccaacccaagaggagaacagagaggcctcaaaaccaaagctaggataagaaacttgtagcccaagagttatcttccagacaaagaagcctgagattccaacgcagcttcagagagtactcactcaaaatgttactgaaactgaaggctttttaatgacttagccatgcatgcaaaaggcattccctaaggtggcacagaagacggagcccccatatccaaagatagccaaggagaaagaaagacccctgttgccagagccagtgggcaaaggcaacagaaaaggagacaagggtcctaatgggatgagatcctttcggatttaggcttttatacaaactcctgagaactggcaggttgacagccataaatggggtaccaacatttctactcattggattacaagttctcaggcatccaaaatgatgaacaaaatgacaatttctagggcttctgtgggaaagtatggaaaggtctttttgaaccttttaatgctgtcaacggaagaatgatgaggttcataaatttggaaaggagacatttcttcatttttatgtttatttttattttttttgagacagagtttcactcttgttgcccaggctggagtgcaatggcgtgatcttggctcactgcaacctccacctcctgggttcaagcgattctcctgcctcagcctcctgattagctgggattacagatgcccaccaccacacctggctaattttttgcagttttagtagagacagggtttcatcatgttggccaggctggtctgaaactcatgagctcaggtgatccacttgccttagcctcccaaagtgctgggattgcaggcatgagccacccaaccagtgagagatttatttcctataaagggttgtagcctgcagggttgtccttctgacaggctgggaagcatagcctccagccagaagccagaaacagactcttcaaggaggaggtaaagaaaatagcaatttatgctgactggaatggccaaatacatttatttaataagctccaggaggagtcatgaatatttatggaaggagaaatgcatgcatgcacaattgagtttctggcttcttcatgggtcccatgtacaaaaaatggcagtgttagcatgatcccagggtgcagttttcagccctctgacattaaaaggtgaagcagaggacatgaaaactcgctctgtgcatcctctgtacgctggccagaacctctctgttgtgggtggtctcttatcaggcaagaaaggagaggttgatatcggtagtggaggctttgaaagggctggtttctgttaaatccttagggaagaaagcctcatcatggttagcaaaggagtgggtttaacgatgtgtatgttaaccccatcatcccatcctagcaaagctgagaactcagttttgaaagttactctgtggtcccctcagccaagagtggttctgttcagtcagttgggagcttataatttaatttttgtttatcaatgctaatgcgaaagagtacgctgtcttcatggcagctgaatttgcaagaaactccttggatggggttaatggcagctgtatttttctgggagctctgctttaattggacaaagtaagttgtggtaagatttcttcttttatcttcagtatctcaaatgttttcatttaaataatctttataacaacttttgatgtctgagtggattcccatacagtcatctattgtaagactttctgattccgtttttttcctttggtcattatgaatagggcttatgtaaataattgcatggtagcttttgattggaagtaacatcaaagtagttgtcaaaatacttaggaatgttatttttggattgtaaggtgagacttgtttagctttggaaaaaaatgcccaacttgtaataggggaggaaaaataattttctgtttttggaattcttagatgggatgctctgtaaaaactgacagattaaaatgagaaaaacagaaaagttgaaaaacacgtataccttatggttacatgggagatattcagggaaaaatgagtaaatctccaacaggtggctttcaattcaagcataaatactgtcttcaacttaaagaaagaagatttgaggtgcagtattggggagttaaccagcaaaagcacattagacaagggtaaggttcattatacagacttaagtccatgcattctccattgataagactctttagtgatttagttatccttctcttcttggtgtcgagagaggtagcttttaaatggtgatttcctttatagatgtaaattttccttacacaagtgtaacttctctgttttcacaacttcctttgttagcatttttttttttcaaaataattagcttggaataattcttaagccaaagggacatattttggggttgcatattctggtttcctaccattatattttggggtggcatattttggtcttatacactgtgttccaccggcaatgaaaagagttcttgtttttcctccagcaatttgtcatttgttaaagagtttagcagttctaagagatatagaccagctgtgctatctttttgtggttttcagttctctagtatgttgagcatctttttgtaagtgtacttgccatctgtagatcttctttggtgaggcgtctgttcagatctgtgtgcatttttaattgggctgtttaacttattgtttagttttaacaattttttatgtattttgaatacaaattctcagatctgtattttgcaaatattttcttcaatatgtggcttgtcttttggttctcttaacaaggtctcttccagagtataaactgtaaatattaagaaa

SEQ ID NO: 12993 - DNA, 10821 bp, Homo sapiens
gctgtgctcttggctcaccacaacctctgcctcctgggttcaagcaattctcctccctcagcctcccgagtagctgggattacaggtatgtgccactatgcccagctacttttgtatttttagttgaaatggggtttgtttacgttggtcatgttggtattgaattcccgacctcatgtgatctgcctgcctcagcctcccaaagtgctggggttagaggcatgagccaccataccggcctttttttatttttttattttttttgaggtagagtcttgcactgttacccaggctggagtgcagtggttcgatcttagcttactgcaacctccataatctgggctcaagtagtcctcccacctcagcctccctagtagctgggactgaagctgtgtgccaccatgcctggctaatttttatattattaggagagatggggtttttctatgtcatcctggctggtcttgaactcctggactcaagtgatcctcctgcctcagcctcccaaagtggtgggattacagatgtgaggcagcatgcccacctttcttgatttttattttttgagacagggtcttgcgctgtctaccaggttggagtgcagtggtgcgatctcagcttactgcagcctccacgttctaggctaaaacagttgtcctcccttagcctccctagtagctgggagtacaggtgtgtggcaccatgcctggctaatttttgtattttttagtggagacgtggttttgctatgtccttctggctgctcttgaactcctgacctcaagtgatccacctgcctcagcctcccaaagtgctgggattaaaggcatgagacaccgtgcctggcctatttttaactttttgacgaaataccaaactgttacaaataggctgcaccgtttatattccacatacagtatttaatggttgtgatttctctctgaccttgccaacacttgctgttttgtattttttggattatagcttttctagtgtgagtgaaggagtatgtggttgtggttgcagtttcgatggccatagtgataatgatattgatcatcttttcatgtgcttgttttccatttacatgtctttttggcaaagcgagcgttcaactctttctccatttgtaatttggttgtctttgttgagttatacaagttccttatatattgtggttaacagactgttgttagatatataacgtgtaaatattttcttcctttctgtgggttgccttttgattttttttttttagactgagtcttgctctgttgcccaggctggatttcagtggtgtgacatcggcttaccgcaatgtctgcctcctgggttcaagtgattctcctcctagcctcccgagtagctgggattacaggcatgggtcaccacacccagcaacttttttgtatttttattagagactggatgtctccatgttgatcagactgtcttggactgctattcacaggtgatatgcccgcctgtgcctcccaaaatgcttggattacagggggagccaccacgactggccagttttttttttgttttttttttgaggcagggtcttgcactgttgccgaggctggagtgcagtggtgccatctctgcttactgcacccttcacattctgtgctgaagcagtcctccttcctcattctccctagtagctgtgactacaggtgtgtgtcaccatgcacgactaatttttgtatgtttagtagagacggggttttgctatgtccttctggctggtgttgaactcctggactcaattgatccacgtgccttggcctcccaaagtgctgggattacagacgtgagccaccatgcctactctttttttttttttttttaaagacatggtcttgtgctgttcctcaggctggagtgcagtggtgccatcttggcttactgcaacctcgatattcggggctcaagcggtcctcccacctcagcctcactagtagctgggactagaggtgtgtggcagcatgcctggctgatttttgtatttttagtagagacggggttttgctatgtctctctggatggtcttgaactcctgcactcaagtgatctgcctgcttcagccttccaaagtgctgggattataggcatgagtcaccttgcctgtcgtgtttttaactttttgtggaaataccaaactatgttacaaataggctgtaccattttatattccacatacagtatttaatggttgtgatttctctctgaccttgacaacacttgttacttaatatttgtggattatagcctttctagtgtgtgtgaaggagtatgtggttgtggtttcagttttgatggccataatgataatgatattgatcgtcttttcatttcctcgttttctatttgcatgtctttttggcaaggtgtgagttcaactcttccgccatttgtaatttggttgcttttgttgttgagttatacatattctgtatgtattgtagttaatggacagttgttagatatataatgtgctagcaaatattttcttcctttctgtgggttgtctttttgctttctttttttttgagacagagtcttgctgtgttgcccaagcgggagtgcagtggcaggatctcagctcattgtcacctccgcttcctgggttcaagcgactctcctgcctcagcctcctgagtagctgggattacagacgtgcaccattacagcaggctaattttgtatttttgtttgagatggggtttgtttatcttggtcaggatggtcttgaactcccgtcctcagttgatcctcctgcctcggcctccagaagagctgggatttcaggcatgagccaccgtgcctggccctaatgtttgtatttttagtagagacaaggtttagccatgttggccaggctggtctccaactcctgacctcaagtgatccatctgcctcagccttcgaaattgctgggatgataggcatgagccatcataccatgtctttttttttttttttttttgagacagggtcttgcactgttgcccaggttggagtgtagtggcacgatctcagcttaatgtaacctgcacgttctgggctcaagcagtcctcctgcttcagtctccctagtagctgctacttcagctgtgtgtcaccattcacagctggtttttgtattattagtagagatggtgttttgctatgtcatcctggctggtcttgaactcctggactcaggtgatccacctgccttagcctcccaaagggctgggattgctggcgtgaaccacagtgcgcagggtttagggtttacagtttagggtttagggtttagggttagggttaggggttaggggttaggggttaggggttagggttaggggttagggttaggggttagggttaagggttaggggttaggggtaggggtaggggtagggttaggggttagggtagtgtaaataatttcacattattactaataacaaattattacttatattacactattacttaatgtaaaggctattaagacatgtttgtcttcaaagaatggcgttggtttctgtgggcagtttctcctcatggaaaggtagtgcgttcctgctaaatcatggacaaaatgggcctccaggagctacaggctgcagaagcagcttctcgtctatgtccttcactgcctgatactgttgttgaccttgaaaccttgttttgggctagttttattaacagagctagtatttccatgaggttctactacataccaggttccagaaagctaaatgccttttgtttgttattattcactaaatacaaatcacaactctcttctcattacacacacaacaaaatttagctgagggagattgagtgactttcccagggtcgcacagctactaagagcagagtcatgtttagattcatgtgggaatactgaacacagaaatgaaccaacggaaacatcctacattccaaaagcctactcaagccatttgttcttattttaaggaaaatctatcatgaatgccaacatacatccctaacaacccagtgctgttaccctccaaacattttatgtcttgcaaagtattagaacttcatatgtgaagccataccactcagagggaatgcaaaatacataatgacatctcctttaggatgtccttagagaattcaaggaaaagaagttaaataatttaaaagtgctttcgggtacagctatttagcactagacagtaagattagacatagattgtaaagataataatagggttagggataggattaggatctgggtcagagtcagggccagaagtatgcttagaggtggggtcatggtcagggtcaagatcaaagtcagggtcaaagttagggtcagaattagggaccagggtagggatcaggatttagattcagggtcaaagtcttgggacagggttagggttaggattagaaccagagcttttttctcctcaggacccacccgaggacgggtcaccatggctttggagcacctggtagtgtggcatgtccacagtgaagaccagagtttcgttgtccttaagactgacctggggagacgtggctgcaggccattgaggaaggtgaggaaaaacttcctgtctgctccccgtgtgctgaggagggagctctgccatgggctttactttcacatgttacattccacaagtcttgttttacaaaagcatcccttccttgaggcttcggctgctcatcactgctcatcatcataacgtgccataacatacagtaagatttgggtttgtttctggggagagatcttggtatagagaaaggagaaatgcttagagccaccatcaggacagttgggatgaaagctggggttgggcagaggctggaggaaacatgtgcaccccctgtaaacacttttattcttgttttaattactcatttttcttacagtgttaaattagtaaaaatagtattgaaaaattgaaaagtaggcgtattaaaacttgcaacaccacttaagcttagatgtattatttgtacctcaacattttttattttgttgagaaagtttaaggttaattggcagcatatttctaatagtagatagaataatgtctgttttataaacattgacatcctacattacatgtgtcaaccctgaaaatctgagacggctctcagattttttagaaagtttattttgccaagcttgaggatgtgcgcccatgatgcatccttaggaggtcctgacaacatgggcccaaggtggtcggggcacagcttggtcttacacactttagggagacatgagacatcaatcagtatgtgtaagatgtacattggttcagtccagaaaggtgagaaggccagacagggggcttccaggtcataggtaggtaagagacaaacgatttcattcttttgcattgctgattaccctctccacgtgaggcaatcaggtatgcatttatctcggtgagcaggtgggtgtctttggatagaatgggaggcagatttgccctaagcagttcccagattgacttttccctttagcttagtgattttgggtccccaagatttattttcccttcataaggttttcctatgagtattaattattcattgtgtattttattacacaaataaggcacagatttttaaaaaatcatcaacttcgtggctacctatatagacataattgcatagaagttcaactaaatttgcaaacatcccagaatttgggtttccaataattcttagtgattctttaaaaggtaaagtatttttttcccataaaacatagcaacatgtaaaatcacccgtagaatgtcccgccatttttgtttttctagtttcctcattttctgcaaagcctcactgaggagattgactttgaatatccttttacactcttctgttttagatagcattgtggtaaaacattgaatcatcatggtcataagttctgtccacattctttctttctttgaatattttttcccagtgagcaatatttgattctgctgtattatggctaaaaggtaggcatggcaacaaaataaagacaggaagtcttcggaataagtgatcccatcacaatgaatcaatttgccattggaacatatttttacaaagtcactcttgtgaaaatatttggctatgaattgaaacagagtctgtaaggttaatatttttcctggtctaaggtgaacagcattttagagaatgaacccaggacacaaccacagcacaagaaaaaaatatgagaattaagtttacacatgtgtgttactacagtaacagaaaacatgtaaagaacatttgttttgatttatatgtcagtctgcactgtttaattttttgtgtcataaatgctcttatttaaaaaaataggactagttaacagtgtcaattactagtaattcatggtataaataattaaacaaggaagtgttcaaaaaacagtgttttaaataaagttttattttacatctttttacttacacagaaattgtcaaaaaaaaaaaaaaaaagatttcccatgtagccgcaacctagtttcctctcttattaacatcttctattagtgtgtctcacatggcttattaatatcttacacaatttgtcacagttaatgaaccaatactgatagactaaagttcatatttcatttggattcccttagatgtgtcttactctgatccaggatcccatccaggatcccgcatgacatgtagtcatcatgtgggctcttcctggctgtgacagtgtgtcaggctttccatctcaggtgaccttgatagtactgaggaggattggtcaggcattttgtagaatgtccctcattgtcacttcatgttctcaaggtgaactgttacctttgatattcacttggatcattttgcagagctactgtttgtcaggttagggttggaattcttttgcaaaggagatttctatgcaactccatttgcttattcacctatgcatacaaatacagacacctagataattactttaagctttagctattattcaaccctgcagcattatgttgcacaattcattcctgtgttggcaatcggtagcttttttttattggctcttatttttctttgatatattttaatttttttagtacttacttactttctgatacttccagattatcctggctcctatatttactctcccagttctagtatcagacatttcttcaaggagcctgattcctttcagaatggtaggaaaacttacgtctggctgctgaaagagcacattgtatcttgtccctcattagtaatgctaggaagtatatgtgtgtgtctaacctacctatacacacctaattataaagttttctatgtagaactgtgtgtatctatattaaactaaacataagtttacgtttatgtctccacctctgatctactatcacatgaattattctagccttgtcgccttgctaatttgtaacctcccacttcaacagtgagaaacctggttcccaccatctgcgacttaatgtaagtcattgttttattccagatacagacactgtggttttacagttgttcgcagttgcttctgttggaaagaactttgtaaaatggaatccaaggatgaagtatagttgatttgccttcagcttacagattctattcattttcaaagtgacttaggtcaacaccattttccctacaccttcagtgagtttttacttacatttgtgtcttagtccattttgtgcttctgtaacagaatacctgaggctgggtaatgtataagtaaaaaaggttcatttggctcaaaatactggtggctgcaatgtctgagattgggcagttgcatctggtggggcctcagtctttttcacctcatgatggaaagtggaaggggagcaaggtgtgcaccagagatcacatagcaaaagtgaaagcaagagggaagccaaggaacccagactctttttaactagctactcctgtaggaattaatccattcctgtgacagcagaactcactcacccccatggaggacattaatgtattcatgagagatccgtccccatgacccaaacaccttccactaggccacaccgccccacactgacacagtgggggtcaaatttctcaaaaagaaataaaaatttttttgagactgggtccggctctgtcgcccaggctggagtgcaaatgtgcagtctcagctcactgcaacctctaccccctgggtgcaagcgatcctccctcttcagcctcctgattagctgtgactacaggcacatgccatcatgcccatctaatttttgtatttttggtagagatggggtttcaccatgttgcccaggctggtcttgaactcctggcctcccaaagtgctgcaattataggcatgtgccaccatgcctggctaaattatagttttccattgaaacataaaatttctctctgtagtaaccatcatttttgatcataatcaaagtaagactattattgttttaaaaataagtctagttttgttagattttgcttgattatttacataagtgcagcaagaacaggagatgaccacataggtgctttcaagtttctttgctggaagttttcatacagaatctcagatttgacttttaaaggccttattcaggctaaaacccaagccaagcacatactatcaaatttcagccgcagtccttatggctttgtgtgaattcctctcttcttgaggcccccaaaatatccccaaattcctgggcctaccgggaaatgaccttctttactaacctgaaggctgtgaaccctgtaatctaggtatcaggctggcttttctcagagtgctgttgggaatgaagattttggtgttccaaaaaaaaaaaaaaaaaaaaaacaacgtgggaacaaatgatgtcttagcgaggcgagctttactttctgcataaagggtgctactcaatagctgtccagccacaagagcacaccaaacaaaggagacagagttacttataacctgatgtgtctaccctagtgctgtgtccagtttccactggctgaaataggacctcacattttacactttacccgattgactattagtttaacactttcttaattaggtaaggggaatagaacaaagaaagaaaaggaagttgcccagggatagttaaggaagcatctccaaataaggaatggcatgtattatgggctggggcttgtctagttctgcccaggcatgctggagcaagctaggacaactgatttggaatacacacacacacacacacacacacacacacacacacacacacacacgtatatataaaaatagtggatagcaatctcaaagtaagaaattagctaggatggtctggatctcctgaccttgtgatccatcctcctcagcctcccaaagtgctgggattacaggcatgagccactgcacccggcacaatatttaaaataataattggaattatgactcattactctatactggcacatagcatggataaggaggacataacaaatttacaggaattttatatcatttctgaaaacataacattttacccatacaaatgtaacacagggaaggttaggtatctctttttatttgtatcttatgtatggttttccttataaaaaatacatcctactttacttgtgaaacatgccctacttttcttgcatgctttgcatggggttgtttctagttattccattatttctaatctttttatttacatatactgattataattttaatacttagtaatcttttattttccagagaaaactaggaagtagtcagttataaagtgtcatatattagcattctatagtaggttagaaaaagtatgaatatactgtctcccaacatctagagggatgtatttcctcataatacaatttctcagtgtggcagaaaaaaacatgtttattaacgggccaaaatatctttagtctttctgtaaaaacaggaagccaaaagtatataaacttgaattatttatgttcagtaattaatgttttagtattgtatcttatttataaatggtctagatatttaatgcaaatcttttacttagcttaagtttaaggttaaaaattagcaaaagtactttggaaactactattaggcagatttactgtgaacaaattatttttgaaataatgtttttcgcttttcacaagacggcaccgaaagcgaaggaagctcctgctcctcctaaagccgaagccaaagtgaaggctttaaaggccaagaaggcagtgttgaaaggtgtccgcagccacacgcaaaaaagaagatccgcatgtcactcaccttcaggcggcccaagacactgcgactccggaggcagcccagatatcctcggaagagcacccccaggagaaacaagcttggccactatgctatcaagtttccgctgaccactgagtgggccggaagaagatagaagaaaacaacatgcttgtgttcttcgtggatgttaaagccaacaagcaccagatcaaacaggctgtgaagaagctctatgacagtgatgtggccaaggtcaccaccctgatttttcctgataaagagaacaaggcatatgttcgactggctcctgattatgaagctttggatgttgcaacaaaattgggatcgtctaaactgagtccagctggctgactctaaatacatgtgtatcttttcaccataaaagaataatgtttttcataagagtgacaacttaattagaatcaaatctataagctttaagattttacatttctgtaagtataatattagcttatttgactagaactcaagcagaataggaatttatgtttgttttatattcaa

SEQ ID NO: 12994 - DNA, 624 bp, Homo sapiens
gaacttctgagctccagtgatcctcccaactcagcctcctgagtcgctaggaccacaggctatcatttgctttctgtcaggaaatacacagggcagatcacatcacttttcattggaatgctcatctgcaggcacttgatgttgtgtatcagtgttttctgtctgctgatgactctcctgttccccttcgttcttgtagttttgtatattttactcaccttcagatcatcttggcagtattgctttctccacttcatttgggatctttccttatttctaattgatcatgtttgccactgttgacagtggcagatccgcatgcgttatttatttcaagaaccctatcccacttctctgcatgcctgcatatattagcctcataaatcaccaagaaaataaagatcttaatgtactctttcaactagctgttgttcagcaagacaccctaaggagagtgaaaactaaagaacaaactggggtaagatatttgttaaaataatatataacttcatataattgtaaaaagattaatatctagactatatattttttaaaaaccctgtgactcaagttataaaaagacaacccggtagaaaagtgaataaaggacttaagcatttcata

SEQ ID NO: 12995 - DNA, 624 bp, Homo sapiens; identical to SEQ ID NO: 12994

SEQ ID NO: 12996 - DNA, 4243 bp, Homo sapiens
gaagatgatgagaagcttattgaggaaatccagaaggaggctgaagaggaacagaaaagaaagaatggaggcaagtgcccctccccaggcccccaggacagagcagcagccaggccatgcaggcttctgctggcctccctgagtgtcctggcactcaacccagcacaggagaggagggggtgctgtccctcaggtggctatagacctgacttcacccacgcggccacatctcaggcttatggaaaggccttcaacgccttgaatatagttttggcatctccttgatggtgaggaagtcccaaggggtgggtttgagctcaggaatcaatcaagccacacctggctaaagaaaagtagacccagctgatccttctgaggctgaaaagcagtgaagccaggtgtgttggcacacatctgcgatcccagctcctcaggaggcagaggtgggagcatcactggatcccaggaggttggggctagcctgggcaaaatagcaagaccccatctgtttttctttaaaaaaaagaggctaagtgcagtggctcacatctgcaatcccagcactcgggagggtgaggcaggtggatcagttgagcccaggagtttgagaccagcccgggcaacatggcaaaaccccatctattaaaaaaaaaaaaaaaagtaactgagtcactgaggtggcccatcaaggccctggctctgaaggatgtctggctgggtgggtggacgtgccaccttccaaggtgccactgtggagcaagacactggtggaagtacagatttgttcttggtttcttgcagtggcatttgggaggtgtccacgttttgtgctttgatcagcatgtggagccactcccgtgtccagaggtcgctgccctggtcccaggctagattccattgaggttggtttaatgtttttctccactaatccccacatccctttcagagaacaccttcaaacgcattggacccccgctggagaagcctgtggagaaggtgcagagggtggaggccctcccgaggcccgttccgcagaacctgccacagccacagatgccaccctatgccttcgcgcacccacccttccccctgcctcccgtgcggcctgtgttcaacaacttcccactcaacatggggcctatcccagccccgtacgtgccccctctgcccaacgtgcgggtcaactatgacttcggtcccatccacatgcccctggagcacaacctgcccatgcactttggcccccagccgcggcatcgcttctgatggccccgaatccccattgagcagcacaaagcccgtttggggtaggagtgtggatggagaaccctcccccaaggctggtgtctgtaccattgcatcctaagtcagcttgaagggtaggctggttttcttcccacccctttcctagaagggctactgctcctggaagagtggacggatccataataaagacgtcccaaatggtggagttcggagagagctgcgatgtgaactgcccctcccctcgcatcccccaggccaccaacggcagtccttctgccttgtccatggcataggccatagaccaggtccctgctgctcacacctgggcctctcctcggagccgacccctgggtagcaaggcagccgagagcatctccctggaggggcccacggttgggccaagggcagagggggctgcacctgcgggcctgggaagcattgctcagggtggggggctgggaccatggcccgcagaggcactgccacagctgtgagggccaagatgctgtccccccatccaaaacccgtgcgccactgcagtgagtgttgagggcacctctcctcccctcttacacctactcagatgaggcagcagcagacccatctcgcggcgggggttttgttctgttgccgcctaactttctcatcctcggtctctggaaagtcaggctgagaaatcctttcccaggccaggccgctgcggtacactggatggttctgaagctggcccattgaaagagcctcttaaggcagctgggacagaggcctggtggccctgctgggcagcccaactgctgggggagacgtttctgccaccctgggtgatgagcagcttttcccccctggctttctgggggaggagtgggcctccttagggagacaggtgaccctgggtgccacccctgccccgtgtgtgccccgggtgttctcagtggttgctgaaggcaggtagagggtgctgtccagtatcccccatgtgaaggtcacttcccttctcatggagtcagctgagcatcagctcagccctgccatgtccccactcaccctcctcgcctcctgtccggccctgggtttctagcggtgcctgaggcatcactctggcccattgacagatgagaggtctgaagccttcctggccacaggcatcactttctcctcctcctcatgccctgccttgtccttgtcgtgttgccatggggttctgagaggctgggagttcacagacctcagacacagctgagtccgacaaccattggggtggggctgcatcagtctccggagtggcccgccacctcctgaagcagggcctggcccacccaaggtgcctggggcaggcgggcaccgtcattcgctgccattggcttctcagatgtatttcaaggactaaagtgggctctaagatctaagatggcccggcgcggtggctcccgcctgtaatcccagcactttgggaggccgaggcgggcggatgagttgaggtcgggagtttgagtccccgtctctactaaaaatacaaaattagccggacaaggtggcgcatgcctataatcccaggtactcaggaggctgaggcaggagaatcacttgaacctgggaggcagaggttgcagtgagccaagattgtgccactgcactccagcctgagcaacaaaagcaaaactctatctttaaaaaaaaaaaaaaaaaaactaagatacccattctttctgcctttgcccaggatggaggctttgaagacaggtggtcacctggacctggggtaagggtgcgcagggaggccgggcttgggggcagcctgctgctatgtccttgctggcgcccatacctgttggactgcctgaactttgctactagcctgaacgacagtgccttggaaaggcaggctccatgcggcagcaacaggattgtcttcggtaccttaaatatgctccctgtgcttccccagggaggatctctgggagcagagggcggctgtagacatcacagctgaagaggtgacctcaggccctgggagcctcagctccctctgccctgtaccctaggcacgtggctccagcaagagccccaggcaggacaaagggagcaggcagcagctgcagaaacagccctagacaggtgctggcctcaaccctggcaggggagggggagcccagagtgatgtttctcctaaggccaaaccccaggggtgggtcatttgagaggagttccagctgttctggccacactgggctggtggggaaggagcggcggcctctttccttggagggtccctgattcctgaggatcctccccgagccaggcacgggggaccacagggctgccgtgagcacccaccctggttctccaggcccctctgtccagaggcagggcctgaacctcgggctcctgcctggaccagtgacagcattggggagagaagcactgggggtcttcagaccagccagcaaggggccgtgccagtgcccagagagcaggtcagacaacaggcaaccctgaggcagctggctccctctctctgccctgcagggcttgccgcagggcgtgaggctccccagccacagccccctcttacttgccttaaaactggagagaggaatctagtatttgcacttagcaaaatatttaaaaactgaaaaaaatgtgcatgatctgtcactttgtataaaaacaagaaacgattagttcattaaactttttctttaccttctggtagtaaaaatagataaaataattccgtttcaactactgtgtgtaaaaagcctgtatcatatgtaactgggacttttgtaaataaatgtttgtgcgctctgctccctccagcttcgtctctccaccccgccatccggcaagttacaggggccgccgacagattcgtccaagtgattgggtctaaaccagcatcctcacctccccgactgggtcctggcaggagcaggcccggaaggcccagtagtaagatccccaccactcccctgcc

SEQ ID NO: 12997 - DNA, 3461 bp, Homo sapiens
tggtttcttgcagtggcatttgggaggtgtccacgttttgtgctttgatcagcatgtggagccactcccgtgtccagaggtcgctgccctggtcccaggctagattccattgaggttggtttaatgtttttctccactaatccccacatccctttcagagaacaccttcaaacgcattggacccccgctggagaagcctgtggagaaggtgcagagggtggaggccctcccgaggcccgttccgcagaacctgccacagccacagatgccaccctatgccttcgcgcacccacccttccccctgcctcccgtgcggcctgtgttcaacaacttcccactcaacatggggcctatcccagccccgtacgtgccccctctgcccaacgtgcgggtcaactatgacttcggtcccatccacatgcccctggagcacaacctgcccatgcactttggcccccagccgcggcatcgcttctgatggccccgaatccccattgagcagcacaaagcccgtttggggtaggagtgtggatggagaaccctcccccaaggctggtgtctgtaccattgcatcctaagtcagcttgaagggtaggctggttttcttcccacccctttcctagaagggctactgctcctggaagagtggacggatccataataaagacgtcccaaatggtggagttcggagagagctgcgatgtgaactgcccctcccctcgcatcccccaggccaccaacggcagtccttctgccttgtccatggcataggccatagaccaggtccctgctgctcacacctgggcctctcctcggagccgacccctgggtagcaaggcagccgagagcatctccctggaggggcccacggttgggccaagggcagagggggctgcacctgcgggcctgggaagcattgctcagggtggggggctgggaccatggcccgcagaggcactgccacagctgtgagggccaagatgctgtccccccatccaaaacccgtgcgccactgcagtgagtgttgagggcacctctcctcccctcttacacctactcagatgaggcagcagcagacccatctcgcggcgggggttttgttctgttgccgcctaactttctcatcctcggtctctggaaagtcaggctgagaaatcctttcccaggccaggccgctgcggtacactggatggttctgaagctggcccattgaaagagcctcttaaggcagctgggacagaggcctggtgcgcctgctgggcagcccaactgctgggggagacgtttctgccaccctgggtgatgagcagcttttcccccctggctttctggaggaggagtgggcctccttagggagacaggtgaccctgggtgccacccctgccccgtgtgtgccccgggtgttctcagtggttgctgaaggcaggtagagggtgctgtccagtatcccccatgtgaaggtcacttcccttctcatggagtcagctgagcatcagctcagccctgccatgtccccactcaccctcctcgcctcctgtccggccctgggtttctagccgtgcctgaggcatcactctggcccattgacagatgagaggtctgaagccttcctggccacaggcatcactttctcctcctcctcatgccctgccttgtccttgtcgtgttgccatggggttctgagaggctgggagttcacagacctcagacacagctgagtccgacaaccattggggtggggctgcatcagtctccggagtggcccgccacctcctgaagcagggcctggcccacccaaggtgcctggggcaggcgggcaccgtcattcgctgccattggcttctcagatgtatttcaaggactaaagtgggctctaagatctaagatggcccggcgcggtggctcccgcctgtaatcccagcactttgggaggccgaggcaggcggatgagttgaggtcgggagtttgagtccccgtctctactaaaaatacaaaattagccggacaaggtggcgcatgcctataatcccaggtgctcaggaggctgaggcaggagaatcacttgaacctgggaggcagaggttgcagtgagccaagattgtgccactgcactccagcctgagcaacaaaagcaaaactctatctttaaaaaaaaaaaaaaaaaaaaaaagatctaagatacccattctttctgcctttgcccaggatggaggctttgaagacaggtggtcacctggacctggggtaagggtgcgcagggaggccgggcttgggggcagcctgctgctacgtccttgctggcgcccatacctgttggactgcctgaactttgctactagcctgaacgacagtgccttggaaaggcaggctccatgcggcagcaacaggattgtcttcggtaccttaaatatgctccctgtgcttccccagggaggatctctgggagcagagggcggctgtagacatcacagctgaagaggtgacctcaggccctgggagcctcagctccctctgccctgtaccctaggcacgtggctccagcaagagccccaggcaggacaaagggagcaggcagcagctgcagaaacagccctagacaggtgctggcctcaaccctggcaggggagggggagcccagagtgatgtttctcctaaggccaaaccccaggggtgggtcatttgagaggagttccagctgttctggccacactgggctggtggggaaggagcggcggcctctttccttggagggtccctgattcctgaggatcctccccgagccaggcacgggggaccacagggctgccgtgagcacccaccctggttctccaggcccctctgtccagaggcagggcctgaacctcgggctcctgcctggaccagtgacagcattggggagagaagcactgggggtcttctgaccagccagcaaggggccgtgccagtgcccagagagcaggtcagacaacaggcaaccctgaggcagctggctccctctctctgccctgcagggcttgcgcagggcgtgaggctccccagccacagccccctcttacttgccttaaaactggagagaggaatctagtatttgcacttagcaaaatatttaaaaactgaaaaaaatgtgcatgatctgtcactttgtataaaaacaagaaacgattagttcattaaactttttctttaccttctggtagtaaaaatagataaaataattccgtttcaactactgtgtgtaaaaagcctgtatcatatgtaactgggacttttgtaaataaatgtttgtgcgctctgctccctccagcttcgtctctccaccccgccatccggcaagttacaggggccgccgacagattcgtccaagtgattgggtctaaaccagcatcctcacctccccgactgggtcctggcaggagcaggcccggaaggcccagtagtaagatccccaccactcccctgcc

SEQ ID NO: 12998 - DNA, 344 bp, Homo sapiens
tttcaggctgtgcccactcagacccagccctctccaaacccttctcatatccaccacttgcacgcagctcagtgcatggaggccctccatccccccacctcaccaggcagctgcctgccatgctcagacccctctgcccagccttgtggatggcctccttgtggaacgccatcaggctgatgaaggaaggaggccttcggggaaataggaaggaacggtgtgcagcccaggccccactggccagcagcaggcttcgggcttgttccatggccataagcaacaagcggcctcctcactgtcccacggggcctcagcactgcatgaagctacaggttcatccttct

SEQ ID NO: 12999 - DNA, 195 bp, Homo sapiens
ccaagttcaagcgatcctcctgcctcagcctcccgagtagctgggattacaggcgtgtaccaccacgcctggctaattttttgtacctttagtagagacagggtttcaccatgttggcgaggctggtctcaaactcctgaccttgtgatctgcccgtctcggcctcccaaagtgctgggattacaggcgtgaggc

SEQ ID NO: 13000 - DNA, 1464 bp, Homo sapiens
ggcttccatatcagaagccttgacttaggagtcagacctgggttcaaagcctagtttcatcatttcttagctatgtgactatggggtgtttacttaacctctctgagatttctttccttgatttataatgtggcatgagcaatacctgccttgcagtgttgcatgtggtgatgtgtcttgcttggagcttcctgtggagtttgctccttcatgggttcattcactcctttttttcattcatttcttcatgtgctgttacatgtacctaggaacatatagcttagtagcttagcagcttagcactaggcgctgggcacaaaagggtggagagggtgtgtgcttagccttttgtggctggtaactctgggcccagagttgaggggaatgatttgactggcgaggcagactctgcttggtcccattgtaaaccagtcatagaagagatgcctgtcctgggtagggccctctcttccttcctggtagtgttctgagcattgtctggatgacaggcctattgagcagtagcctgtggacttgggagggaaactagggctggagagcagctctgggaggcattggggagggcgtaggtgcgatgagtcaccatcctccctcaaggacgtcttgggcaagttgtctggccccattagccagcaaccagggaaatgtagctgcaggaaaatcacctcgtttcctcgggatgttttttcttaggctggtttcctttacaagctgcaattatgttccatcccacgcaagttcagtaagtggcacttttcagagaaactgtcttggtgatcatttgggctgctgtgggccagggagttgaggagagaagggagtgagagcttctactgagtttagttggttttgtgtccatgagccatttacaaactttgcacctgattgggctcagttgcagtttcttgtatttccctaccagccaagctgttgaagctgctgagcccggaatgatgttatcactgaggcagatgacaaaccctctagttgctagaaaccaaactgctccccgagctggtgtttccgttttttgtactgactgcttatttgggcttgatatataatggtgaaaacaggaactgtttattttaggtgataagaaaccaacattatgacaagaagatgtcatcttagttactctgttaccagtaccataggccagatactatctagatgcttataaacatcttatctaatccttgtaataataagccccaagctaggttttatatccccattttatggatgggggaactgaggccaataacttcatataacttatccaaggccacaaaactagtaataaacagagtgaaattcaacccaaaaacaaactacaaatccaaatttctttacctctatgctgtctgtacttgctgttactagcaaagttctcttggtgggagttaccccatcccctctccaaaaaaaaaaaaaaaaaaa

SEQ ID NO: 13001 - DNA, 194 bp, Homo sapiens
acacggcgaaaccccgcctccactaaaaatacaaaaaattctatgggcgtggtggcgggcgcctacagtcccagcttctccggaggctgaggcaggagaatggcgtgagcccgggaggcggagcttgcagtgggcggagattgcgccactgcagtccagcctgggcgaaagagccagactccgtctcaaaaaaa

SEQ ID NO: 13002 - DNA, 435 bp, Homo sapiens
aagcattcagacctgcccagggtttgaactcctgagattaacagtctcaagttcgagcaatgggactcgggaattaaaggtccaccgaagctgtgcagtcttccctttggtatccccaaaggaagagttgcacatgggtacacttgacacccattcccacatcccacatattaaagcccagtgatgccccacctcactgtgccagtttggcaaactcccttgcgagcggggaccttttgctaagtgactgcctcagtaaatctaactcgttagtttaatgaggcagcaaacgtggcctctgtgccatcaattatgaaaagagctcctctttgagcaaaagaaaagctccaaccaaggaaaagtgtcttctgtggaaagctagtgcaaagttaggaggcctggttgccatggcaacagcctcagtggtgtgtgtgg

SEQ ID NO: 13003 - DNA, 805 bp, Homo sapiens
atggggctagccacacatatgttttacaatacttggtctgcaatgctgtcttttgggtctgagtttcttctcaggagggtatctttgggccagcaataacaatcattgttcagttatacaaactttataatttctgaagtaatttcctatacatcatttcacttagtctttacaaaaaccctatagagaaagcagggtaaagtctgaaataataaataataatcagttaatggaaatagagtatctacatcctggaaatgatggctatgttatacactatgctagctctagacattcttgtatgtggatgaaattagcttcaatacaaccatatgaacagattgggtccagaggcagagggaggcacacacagatcatttgacttgcgtgcttcagatgaggaaacacgcatagagggttaagtggcttgcagaagggcaaccactaggcaggggtagaggcagaacttgaaactacacacacccaacaaatagttcccatatgtgcctggccttggggtagggagacagatgcaagaccagtaggcccttcctccaaggagctaccagtcctgcaggagaaagacatccctcattattcaaataatacattttcaaattacaatagcaagaagtgccctagaaaagaaaagagatctggggtttcttccacttgtgtctacagccacaagccctggccccagctccctgctctctctcctctgatgcaggattatacttgcagtctcagacacccaagcaagggttattcttgggaaggggcaaccacacggcttctaatcctt

SEQ ID NO: 13004 - DNA, 852 bp, Homo sapiens
tttttttttttttaaatgaaaaactaactggggaaatacattcttggatggggctagccacacttatgttttacaatactgggtctgcaaggctgtctttggggtctgagtaccttctcaggagggtatcttggggccagcaataacaatcatggtccagttatacaaactttataatttctgaagtaattccctatacatcatttcacttagtctttacaaaaaccctatagagaaagcagggtaaagtctgaaataataaataataatcagttaatggaaatagagtatctacatcctggaaatgatggctatgttatacactatgctagctctagacattcttgtatgtggatgaaattagcttcaatacaaccatatgaacagattgggtccagaggcagagggaggcacacacagatcatttgacttgcgtgcttcagatgaggaaacacgcatagagggttaagtggcttgcagaagggcaaccactaggcaggggtagaggcagaacttgaaactacacacacccaacaaatagttcccatatgtgcctggccttggggtagggagacagatgcaagaccagtaggcccttcctccaaggagctaccagtcctgcaggagaaagacatccctcattattcaaataatacattttcaaattacaatagcaagaagtgccctagaaaagaaaagagatctggggtttcttccacttgtgtctacagccacaagccctggccccagctccctgctctctctcctctgatgcaggattatacttgcagtctcagacacccaagcaagggttattcttgggaaggggcaaccacacggcttctaatcctt

SEQ ID NO: 13005 - DNA, 530 bp, Homo sapiens
gcaccacctcagacagtctattctgtgcagaaaagccaagctttcatttgccagcccagcccacgaggggtggaagcaccaggtgaaacagcccggaacactgaaggtgacttgttggtgtgtggctagagccaggtgcttaacccctcatgctgtgaccctgcgctgccatcctcccaccccagaaatcctgctctgctgttttgtggggctcccagtgggctgataaaaggcagggcatgagaaacaggcctggggcacacccagcagtgcttgccgcacaagaggaacagggtgtttgtagccctcgttgagtttgagaactctaaaagttctcaactttgtacaacagaaaactaatgaggcgcgacaacccccactgccccaccttgccaactacaatgtgaagggaacgaccattttcccgactgtcaataatgttctgagccccgtggaagatgagctgcccacacagagccctcgagtgtcctgtgaggaagataggcaggtggtgggtcatgtggtttgtt

SEQ ID NO: 13006 - DNA, 530 bp, Homo sapiens; identical to SEQ ID NO: 13005

SEQ ID NO: 13007 - DNA, 983 bp, Homo sapiens
gattttgcaaagccacagaacaatgtgtgaccagcagaagcagccacagttccctccatcttgtgtgaaaggttcgggactaggggctgggcagggtagcaatggtgcctctgtgaaatgcccagttccatgccagacccaaactgtctgtgtgacaggccctgctccatgccctactcaaacttatgtgaagtaccaagttccatgccagactcaaacctacgtgaagtgcccagctccctgccagaggacctatgtgaaatacccaacaccctgccaaacctatgtgaagtgcccagctccctgccagacaacctatgtaaaatgcccaactccctgccaaacctacgtgaagtgcccagctccctgccagatgacctacatcaaaagtccagctccctgccagacccagacgtgctatgtccagggtgcttctccttgccagagctattatgttcaagctcctgcaagtggctcaacctcccagtactgtgtcactgacccatgctctgctccctgttccaccagctactgctgtctggctccccggaccttcggggtgagtcccctgagacgctggattcagcggccccagaactgcaacacaggatcatctggctgctgtgagaattcgggaagctctggatgctgtggttctgggggctgtggctgcagctgtggatgtggcagctctgggtgctgctgtttgggaattatccccatgaggtcccgaggtcctgcatgctgtgaccatgaggatgactgctgctgctaaacatacgacagctcaactccagaatgcactgccccgctaccccttctggaacatgcaccagcttctggccccctctctgttagtgccagtgatgtagaacctcatcactttgcctctgtgctttgcttctctaccaaggcagcctgccagagttagtacagtccccaaactttggcatgaataaagctctgaatgcatttcgtggtaa

SEQ ID NO: 13008 - DNA, 3587 bp, Homo sapiens
ggggaatcctgtgcatacaccagagtgctcacttttggtggatagttctcttctttctgatattctgccctgcaaattctagctaccttggcttccctgacctctgaattcttgtctgctcaactcaaggagaccgcaagtgactgtatgggttcttatccctacacgctggcctggaaaccctctgtagctggggcaaatatagacttcactttctttgtatcctttatctcaggaatccctgtcctgtgctgtttgctgtccagtgtccaagaactgttgtttcatatattttgtctggttttatttaaggaaggaggataaatgtggcctctgtaattccctgtgacctgaagcagctgataagtcccatattttataacaaaagactgacttcttagatgtcctttctcatataatttatactctctatatataacaattgaattgtaactcataaaattatagcagtgtcagatgtgtccatcaattaagttccataatacataagaataaaatggaaagtacattgtgaacttcgatagacatgttcacagaataacttgttattacttggtttaaaagtgcaatcctagttcatttgtttatatattttctaaaagtttttatagatctctgaattaaaatacttgtgatgatatttctgcttttatctgtattttatgttccaaaacttcacaaattatactgttaactaggtttgtataccataaagacaaatgttgaataaatagctgttctttcaatttctttaaaaaaaagatccaagatgggcattatattcattgtatgtttacaaattcttacattttagttattcttcagcaaaaaatccagatggatgtttttttcagaaagtgttgaatgggtttacaaagtttttttgtaaggaacaatattgcaaattactaaaattgtatttttataggctgtttgctcttttgtggatattgtgcctgtcaggattcttgaaggtaagttatgttataatggttaatttgaaatataattctggctgtgtcaatataaataacctcaaaaagctataagagatactcttatgataggacacttagttataattatccagaacatttgtatatagaatgattatagaattatccctttagaaaatcagggtcttgtgttggtccttattattgactgaaaaaaagatgaatgaataaatgaattaaattacatagaaagaggcccttgcttacaactgccaagctccagtggcacatttaattgtgaaaaacgaaatatatttttaaataatttatatgtggaatgctgtttttcaaagtgggtaatttagtttaatggaatataaccactcattcatccttccatccaacagaggcaagtttggacttgccttgcctttttctgcttttaacatttgtattcaaagttgtacaccattgtcaaatgtataatgtagcagtaaatcattagaggaagtaagttaagtcctgttaatactgttctcaaatataaacatatttctttaatctcttccctatagttttttttttatagtgagataatggagttggtcttagccgctgcaggagcccttcttttctgtggattcatcatctatgacacacactcactgatgcataaactgtcacctgaagagtacgtattagctgccatcagcctctacttggatatcatcaatctattcctgcacctgttacggtttctggaagcagttaataaaaagtaattaaaagtatctcagctcaactgaagaacaacaaaaaaaatttaacgagaaaaaaggattaaagtaattggaagcagtatatagaaactgtttcattaagtaataaagtttgaaacaatgattaaatactgttacaatctttatttgtatcatatgtaattttgagagctttaaaatcttactattctttatgatacctcatttctaaatccttgatttaggatctcagttaagagctatcaaaattctattaaaaatgcttttctggctgggcacagtggctcacgcctgtaatcccaccactttgggagaccgaggcaggtggatcacgaggtcaagaggttgagaccatcctggccaacatggtgaaaccccgtctctactaaaaatacaaaaattagctggatgtggtggcacacacctgtagtcccagctagtcaagaggctgaggccagagaatcgcttgaacctgggaggtggaggttgcattgagccaagatcacgccactgcattccagcctggtgacagagcgagactcagtctcaaaaaaaaaaaaaaaatttttcttcctaaattagccacgcatagcggttcgtttgcaattcaaaaataattttatgagtagataagaatatcagtttaccgttgtctagtgattttatctaaattttccctgaattattaagtaatattgatttggctttgattctgaagtagtagagtctttaccattataaactgtaaatctctttttgcttaaaaggaaaaaaatgtaaaagataaattccacagagaattattcagtattacattaaaatgttaatgactttttattttaaattgtactaacattaaaagttggcctgaaagtcagatattatgacaaaatttgacattaattgtttttaaagtatagatttcatttgaaattatagaatgctaatgtggttagaggacaccaaagatactgggtcatcagccattaagtatatctatttcaaaattaaaatatttgggaagtattgtcttatggtttcatttgtgttggtccacacagcatgttaggtcagtgtaccagtaaccaatgaaattttgtcaaattccctcactgtactagtttgttaggctgccataacaaagttctacagcttgggtggcttcaacaagaaatttgttttcccacagttctggaggctaaaagtccaagatcaaggtgttagcagggttggtttcctttgaggcctttctctttgatttgtagatggccatcttctccctgtgtctttaaatggccttccctctgtacttgtctgtgcccaaatttcttcttcttatgaggacaccagtcatactggattagggcccacactgaggacctcatttttccttaattatctctttcaaaacctatctccaaatacagtcacattctgaagtgctgggattaggatttcttcatgtgaattttggggggactacaactcagcccataacaccccctaagtatttcccagctattaagttgaaataaacttgtagtatcaatttaagcttgcatgatttgtagatgtaaatttgactttattatcattaactgttgaattatcaagtgtatgatgcagtgcaatcaagtttaacagcatggtgggtaagagcatctagattagaatcattgcagtccaaccaggtgcttaagtgacatttggcgaattatttatccttccttaggtcttctgcctcatcttcataatgggaataatgatgtctagcttattgggctgttataaggattaaatgagatagataaataaactaaactaagtgctt

SEQ ID NO: 13009 - DNA, 650 bp, Homo sapiens
ttattcctctgtatatgtttcctccacacatacagagctacttttaccattttttctttatcactggtttgcagtaatttgattaaaatattccttggtgtggttccctccccctccacttttcttctgtttcttggatctgacaatgtaaagttttcctcaaatttggaaaaaaaaattgtttaagagatggggtcttgctgtgttgcctaggctggactcgaactcctgggttcaagtgatccctccacctcctgagtagctgggattacaggcacacaccactgtgcacagctcaaatctgggaaatttttggccattatttcttcaaacatttatctgtctccccttctttctcctttgcttgagactccagttacatctgtgtgagacttctagatgttgtcccctaattcactgttctgttttttttgtttgtttgtttttctttgtctttttctctctgcgattcattttggttagtttctattgctgttttcaaatttagtaatcttcttcagtgtctaatctgctattaattccaatcagaatatttgtgtttcatatattgtatttttaatcaattaaagttcagttcaatttgtgtcttttgaaaaaaaatagtatcttccatttctctcctcctcatg

SEQ ID NO: 13010 - DNA, 12509 bp, Homo sapiens
ggagttagcgacagggagggatgcgcgcctgggtgtagttgtgggggaggaagtggctagctcagggcttcaggggacagacagggagagatgactgagttagatgagactagggggcgggctgggggtgcgagaaggaagcttggcaaggagactaggtctagggggaccacagtggggcaggctgcatggaaaatatccgcagggtcccccaggcagaacagccacgctccaggccaggctgtccctactgcctggtggagggggaacttgacctctgggagggcgccgctcttgcatagctgagcgagcccgggtgcgctggtctgtgtggaaggaggaaggcagggagaggtagaaggggtggaggagtcaggaggaataggccgcagcagccctggaaatgatcaggaaggcaggcagtgggtgcagggctgcaggagggccgggagggctaatcttcaacttgtccatgccagcagcccctttttttccagaccaagggctgtgaacccgcctggggatgaggcctggtcttgtggaactgaacttagctcgacggggctgaccgctctggcccagggtggtatgtaattttcgctcggcctgggacggggcccaggccgggcccagcctggtggagcgtccaggtctgggtgcgaagccaggcccctgggcggaggtgaggggtggtctgaggagtgatgtggagttaaggcgccatcctcaccggtgactggtgcggcacctagcatgtttgacaggcggggactgcgaggcacgctgctcgggtgttggggacaacattgaccaacgctttattttccaggtggcagtgctccttttggacttttctctaggtttggcgctaaactcttcttgtgagctcactccaccccttcttcctccctttaacttatccattcacttaaaacattagctggtcatctggtaagcccgggacagtaagccgagtggctgttggagtcggtattgttggtaatggtggaggaagagaggccttcccgctgaggctggggtggggcggatcggtgttgcttgcctgcagagagggtggggagtgaatgtgcacccttgggtgggcctgcagccatccagctgaaagttacaaaaatgcttcatggaccgtggtttgttactatagtgttcctcatggcgagcagatggaaccgggagacatggagtccctggccagtgtgagtcctagcattgcaggaggggagaccctggaggagagagcccgcctcaattgatgcctgcagattgaatttccagaggcttaggaggaggaagttctccaatgttctgtttccaggccttgctcaggaagccctgtattcaggaggctaccatttaaagtttgcagatgagcttatggggggcaatcttaaaaagtccacagcagatgcatccggctcgaggggccatcagctttgaataaatgcttgttccagagcccatgaatgccagcaggcacccctcctttcctggggtaaaggttttcagatgctgcatcttctaaattgagcctccggtcatactagttttgtgcttggaaccttgcttcaagaagatccctaagctgtagaacattttaacgttgatgccacaacgcagattgatgccttgtagatggagcttgcagatggagccccgtgacctctcacctacccacctgtttgcctgccttcttgtgcgtttctcggagaagttcttagcctgatgaaataacttggggcgttgaagagctgtttaattttaaatgccttagactggggatatattagaggaagcagattgtcaaattaagggtgtcattgtgttgtgctaaacgctgggagggtacaagttggtcattcctaaatctgtgtgtgagaaatggcaggtctagtttgggcattgtgattgcattgcagattactaggagaagggaatggtgggtacaccggtagtgctcttttgttcttgcttcgtttttttaaacttgaactttacttcgttagatttcataatactttcttggcattctagtaagaggaccctgaggtgggagttgtgggggacggggagaaggggacagcttggcaccggtcccgtgggcgttgcagtgtgggggatgggggtatgcagcttggcactggtactgggagggatgagggtgaagaaggggagagggttggttagagatacagtgtgggtggtgggggtggtaggaaatgcaggttgaagggaattctctggggctttggggaatttagtgcgtgggtgagccaagaaaatactaattaataatagtaagttgttagtgttggttaagttgttgcttggaagtgagaagttgcttagaaactttccaaagtgcttagaactttaagtgcaaacagacaaactaacaaacaaaaattgttttgctttgctacaaggtggggaagactgaagaagtgttaactgaaaacaggtgacacagagtcaccagttttccgagaaccaaagggaggggtgtgtgatgccatctcacaggcaggggaaatgtctttaccagcttcctcctggtggccaagacagcctgtttcagagggttgttttgtttggggtgtgggtgttatcaagtgaattagtcacttgaaagatgggcgtcagacttgcatacgcagcagatcagcatccttcgctgccccttagcaacttaggtggttgatttgaaactgtgaaggtgtgattttttcaggagctggaagtcttagaaaagccttgtaaatgcctatattgtgggcttttaacgtatttaagggaccacttaagacgagattagatgggctcttctggatttgttcctcatttgtcacaggtgtcttgtgattgaaaatcatgagcgaagtgaaattgcattgaatttcaagggaatttagtatgtaaatcgtgccttagaaacacatctgttgtcttttctgtgtttggtcgatattaataatggcaaaatttttgcctatctagtatcttcaaattgtagtctttgtaacaaccaaataaccttttgtggtcactgtaaaattaatatttggtagacagaatccatgtacctttgctaaggttagaatgaataatttattgtatttttaatttgaatgtttgtgctttttaaatgagccaagactagaggggaaactatcacctaaaatcagtttggaaaacaagacctaaaaagggaaggggatggggattgtggggagagagtgggcgaggtgcctttactacatgtgtgatctgaaaaccctgcttggttctgagctgcgtctattgaattggtaaagtaataccaatggctttttatcatttccttcttccctttaagtttcacttgaaattttaaaaatcatggttatttttatcgttgggatctttctgtcttctgggttccattttttaaatgtttaaaaatatgttgacatggtagttcagttcttaaccaatgacttggggatgatgcaaacaattactgtcgttgggatttagagtgtattagtcacgcatgtatggggaagtagtctcgggtatgctgttgtgaaattgaaactgtaaaagtagatggttgaaagtactggtatgttgctctgtatggtaagaactaattctgttacgtcatgtacataattactaatcacttttcttcccctttacagcacaaataaagtttgagttctaaactcattagaattgttgtattgctatgttacatttctcgacccctatcacattgccttcataacgactttggatgtatcttcatattgtagatttaggtctagatttgctagctccaagtaattaaggccatgtaggagagcatggtaaccacagatagaactggtattatcccaagtggtctgcagactgctgagtggggatgggatctgctctctgttgagagttggtaatcattggtttgaaatgtgatgaaaccactcaagccaatgaaggtgggtgtgtaggtggggagtactttgccataatattttaaaacattacctggttagagttctaagtggtacttatttttgtttggttaggggaaagcctgaataaaaacagaaatggacacataatatgcatattccatagtctttgggaggctggaatgtgcctgggatttgggtctaagtgtatgcgtaattcttacctcactaaagaatttgccttgtttttttccttttggtgagtgactaaaacgtctgggcttccctgtgtgcgtgctacagtaagcaagcagaggctgtgcaaaggtgtgagcaggatcacgtggaatctggaggatacatcttggcttgcaaactgcctctgtctcctgggtgggactgttctgtccttgcactgctgttctgtgttacctcttggggtgtaaggttttgcttacaggagacaaactttgggcgtagaatggaagccactgccagcctctgtgctgagaaggaaggtgcttgtttcaaagggagcagcaagggaggcttgttctactcacctgggcctgtttgcctgagaaggggagataagggctgaactgggactagccagggggaccaacacaaatggtgggggatcatgacctgaaggattctttccttcccatgagctgcagggctggttgccgtccttgcaactgtgtcttatttgcctgtgccgttatatcttggtgacccctccacgtgtacactactgacaaacgggtggagtgctggggagaagtcactgtgccgcccacctagtaaaccttctgtctgtgctcatggcatctccaagatggggcactgctgtgtgcagaatccagggtcctctttctgcttgcaactcctttccctggatgccccagaaacaatccaggcctcctttcctatcttacccctttgctttgctttttaccccagcacctctataaccgccttctcttcttttcagaactccttgtttctcatcctgttttttatgattacaaaactcttgcttccaccctggaagataactgctatagatgcctgtatgtaaatggtgctgtctccagcaactggcatgctgaagaagaattgattcacggggtataaatgttggggattggaagtggggatgaaatggcacttgttgatacaggagcagagaggtgaggccgactgctgaagacagctcgccaccctccttgcctccactccaatccaggggctggggccacattctttgccttcatttatcctcagatcaggtgagatcgacaggaggtgttgatggcagtgccagcaattattgctaatccgtttgcatccttatgcatagatctgaattcagactttgtgaatttccagaggtgtgggtaatataatagaattcagtgagtgggcatggctgatcttgtgcaaattaaaagttatggggcataagaatagcaaaagttgaacttcttttaaaaaggaaagtaccctgagagccagtattggttgaggctcttcagtatgcccaggttggcagcactgagaaccgcaggaacggcctgttgttacaaaaaggagattgactcagctgcccttggtgcatctgactgactatgactgctgagagattccaaggacccttaatgccagggctaacctctccatgtgcagtgagacctctggaggaagtgtcatcctctggctttgtgtggtactcattatggtgcagtgcgggcatgaaatgaagacacccaaataggcttacagatacgatatgttttaaatgttcgtatttaacaaaaacatactgacactgtttggaaatggcaacaggaagatagcaaaatgaatactaacattacgaaaagatgaacaggtacatgttccaaggcaggtggctgtgaacttcctctgagtgaaggcatcccctccagcacctttcagcctgctagttaggacgacccgccgccaccctccaggacctccagccctgcactgcctttcctctcttttaaataattcttcattgagttctaatatgtaaaaaaaaaaagtttactgtaaagtttgcaaataaggaaattttttttaaaagtcctcagtaatcttaccagtaacaattgttatgggcacatttgcttttggaagatttcttttgtatgcatgggataagtacatttttaaacaaaaatgggattatgccataaattctattttgtgactttaatatatagtgaacaccttttttaatgatgacaggatgttcccttgcatggctgtatcaatttaaacaatcttgtttcaatgggcatacagggtattttctagtttttttttcctcttagaaaataatacttgcgatgactttccttgtagctcagactttttcacgtctgttgttatctctttgggaatgctgaatacatacatttcgagaaggaaatgactgttaaactcttaagacttcaggttcatattgctaaactgcccagcagggagggattttttcaattagtgttctcactggtgaggcaaacctgatgccttcccctcttcctcagaaccggctttatcacattgaaaacctttgctcctccgacggatcgagtctgctttccctgtggatgtgagcattgctttgtctgctggtgactgaacatctctaccatgtgtcaattggccatttgtggtgtgtgtgtgtgtgcgtgtgtgtgtgtgtgtgtgtgtgtatgattttctaattcctagtcatttttctattgattgttttgcaaaagccatttacatcttaaggatattgataatcttttgttatatttgatgcaaatatttttttccagtttataggttgccttttaattttgtgtttcaggtagataaaagttaaacgattttcttaggttagtttatcactgtggtttctgaacttgttatgtgtagatcttttccaccccaagagtacataaatattaatccatactttcttatggaacttgtatggtttcgttttttacatttaaaccttcttccccgtggtgtgtgttgtggaatctgtgtttgtgtgaggaggggcatggtgctctcagaacccacctcctgtggccagagagccctgtcctgtgagggtggttatcacagtggcagggttcaattcagaagaccttgagggcaggctgatgtttcctgaatgggcccctggttgttgcttgtccctgactctccatttccccatctgagtggatttggacctaatagggcactggagctggttcgaatcctgactggactacttggcaactttatgtctgggagcaagttacttaacctccccaagcctgtgtctgtgaaatgcgggtaaatgaatgtagatgtttggcagcagctactccttgttgagctctcacagtgaactctcctgcctctgccctccttccccgcctcccctggtgcctagcgtcaggtctagccacttcctcctgggcccctctcccttttctgtggctggctgcctgcccgcctggcgctggacctttcatgtaacgggaatcagcatgtatattctggtctggtctgtttctacacttaattttgtttccagtagtatttccctgtaccggcagagttcacaaacacatttgaagaggctttttctcaggattcttaaccttcccaaaggaagtcccatggatgggtttctagaagtctataaatgctctgaaattgtatttttctgtggaaagcataactttcatctgcttgttcgtgctcaaaaaagatcatgaatgaatgattgcatgattttatgccattgtgcttatactaaaggatatgtagcccatctcttgagctgttaaactgttttgactactttaaatcgtgcagctgtgagcatctctgtaaatttagtgtacacatgtatcccctggagtggcattgcctcggcagtgagcacttatggttttataactctcttcacagactcaaatgactccagaaagctacacttcctgttgtgagtatatgatatccatttccctacatagccactaacatcaggtttttacaattttatttatttcttgctactttaagaaatttttgtggtgaaatacatataatagaagttgactatctgaatcatttttaagtatacattcagtagtgttaagtatgtcgccattgttgtacaaccaatctccagaactttttcatcttgcaaaacaaactctgtacccattaaataacattaaacattccattccctccagcctcagcaaccccattctactttctgtttctgtgagtttgactattccaagcacttcatatcagttaaatcatgaagtatttgtctgtctgtgactggcttatttctctgagcacagtgtcctcgagatgcgtctatgttgtagcatatgtcagaatttccttcctttttaaaagatccaaataatattcttattttatatcttttttttatccattcatccattagtggacacttgggttgcttttggctattgtaaataatggtgctatgtacaaatatctatattattgtatttacaagtataatgctgtaatgtacacacatctttttgagatcctaccttcagttcttttgagtatatagccagaagtggtattactaaatcttacgatatttctatttttaatttattgaggaaccactgtagtttttcatagcaactgcaccattttacgttctcaccaagagtgcacaagggttccgaggttcccacatcctccccaacacttgttattttctgctttttttagattgcagccatcatagtgggtgtgaggtgacatttcattgtggttttgatttgcatttccctaatgaggagtgatgctgagcatcttttcatatgcttactggtcatttgtatgttgtctttggaaaaatgtctattcaagtcctttgactattttaaaaattgggttattagagttatcgttgttgttgacttgtaggagtttctttctatattctggatattaatcccctatcagatatatgatttgcaaatatcttctcttattccataaggttactttttcactttgttgattgtgttctttgatgtatagaagtttttagttttgaaatagtctaatttatctgtttttacttttgtggtctgtgcttttggtgtcatatccaagaaatccttgccaaatccaacgttataaggtacttttaaggtattttagttgtcttagtctatatttctgtactcacctttctttatccactcatcagttgatgggcatgtaggttggttccatatctttgcaattctgaattgtgctgtgatcaggtgtctttttagtataatgatttactctcctttgggtagatacccagtagtgggattgctggatcgaatggtttttataattttctattttaccacagtttctctctgcatttttcctctttgaccactaaccatgtgaaattctcatattgacctttataatgatcatgaactcttagtatcattgggaaggccacatttgccacttatgattgtaaaccttatcctccatttttcctgttattgttggtgcaaaaagcacctattataccaggactttaaaaatcagtctgataagtctttgataagtctaataataataactgataagtccattgaatttgcttctgattactttttctttagtagctaaacatgtatgtactcctatgattacaatgaacactcctctccatttaaattaattatttacattgatgaaatagcaaaatgttaatgactaaatactgtcttggttttttcgttccaggtcagtcaatattaacttcttataattttcttttttttctttatgtgtgtgtgtgtgtgtatttttttttttttaatttcaatggcttttggggtacaaatggcttttggtcatatagatgaattctacagtagtgaagtctgagattttactgcaccggtcacctgagtagtgtacattgtacccaatatgtggttttttataccttgcccccctcttaccctccccactttgagtctctagtgtccattatgtcactctgtatacctttttgtacccataagttagctctcacttataagtgagaacacacagtatttggttttccattcctgagttgcttcacttagaataatatcctccagctccatccaaaattgctgcaaaaaaaaaaaaaaccacaaacattattttgttcttttttattgctaagtcatattccatggtgtagagataccacattttatttatccactcactggttgatgggttggttccacatctttgcaattgtgacttgtactgccatcaagtgtctttctggtataatgacttcttttcctttgggtagatacccaggagtgggattgctagatcaaatggttcttaacattttctctctggatctatttctggaaattttaggctccagtttttgttgttgttgttaataaaatgcaatggaatgtaatgatcatcacttttcattatgctttaaaatctggtaaatggaggctagaacactcctgtaaggcaagaatattctctctgttggaactcaaatacacagaactgggtaaatctcaatcttaatctttgattcaggacacaacatggctctcttttacttgctttctttaattgttttttaataatgtggtaagcatttctgaatctcctatccaatacaaaaactaggacaatacagacagtaactcctatggttacaatgaacactcctctccacttaaattaattatttacactgatgaaattgaaatagcaaaattttaatgactaaatactgtctttgattttttgttccaggtctgtcaatattaacttcttataattttctttttttttctttatgtgtgtgtgtgtgtgtatatatatatatatttaatttcaatggcttttggggtacaaatggcttttggtcatatatatgagttctacagtagtgaagtctgagattttactacaccttccacttatgtggtcccacaccacccgcctcccctgccgcctcctgccaccccctaggccaaggtaataatcatcctgaatcctgggtttatctctcacttgctttcttttcatataattttgcaaaagaatctgatctaaatgtgtttttcagagtatatatttatattttagctgttcttagagaaaatttattattttgcatgtaatcttatggaacattctcatttaataccatggtaagattcagcccttgcccaggggatagttcatttagtttgtttactggatagagctcatcatgtgactatacctcagttagtttatcagttctcccatccatggtgactaggttgcctctcagcctctcaacaacactgtttctcagtgtccttgtagaagtgatatgtgggtgttttctccttacacagagttgaaaggtgacgacaacaacgttggcactaccaatcccccaccctccagaggggtaaccagtgttaccagtttgctgtgtttcctgctacacctcgccttattcacttccatttgtatctgaaaaacgtgttgcatggtttcttttctatagaagtggtaaaatgctattgtgtcctgtacattattgattactttttttcatttaacagtagggagatgcctgggagtacacagagaactgccctcattgttttcaacttctgcactgtatgtctgtgagtttagccattctgctgttaatggaaatttacagtattctaatcttttgatattacaaacagttctgtgcgatcatcgtcatacacaaccccttgtgcacaatgcatgagtgtttctcagggtaggtaccaagaagtgaaattcctgggtcatagggcgtgagtccgacatttttctccattctgccctgttgccctccagagtgggtgtccagctttgcatacctaagtatgagagtatctgttgttcatatcctctacgacgctccatatatgaaacttaagtttctgctagttgccatctttgatctatcatgtatgcagtgacctactaagactgtaattggtacagtagattcttgtcatctgtgtgtgaatttagcattcatgggcttaatgctgacaaggcccccagggtccaagacatataatcatgtataattttgtcaaggtataattttttaaattgcttttgtcatgtgtctgctggtgatgcccaacccagtgctctgcacccaggtcacactgtggctttgtcctctgcttatgcctgcattgcagcaactgtcctgaagagaccaaaattatgcagatttaggtaagtccatggctaatgttattatattatgtgctattgtaatggatggggctgtggagtgtatgaatttataaatcactggtcttgtaattaaaattcaaacactatagaaaaaggccatgtagaagataaaagttcctctataatcccggaccccta

SEQ ID NO: 13011 - DNA, 10226 bp, Homo sapiens
ggagttagcgacagggagggatgcgcgcctgggtgtagttgtgggggaggaagtggctagctcagggcttcaggggacagacagggagagatgactgagttagatgagactagggggcgggctgggggtgcgagaaggaagcttggcaaggagactaggtctagggggaccacagtggggcaggctgcatggaaaatatccgcagggtcccccaggcagaacagccacgctccaggccaggctgtccctactgcctggtggagggggaacttgacctctgggagggcgccgctcttgcatagctgagcgagcccgggtgcgctggtctgtgtggaaggaggaaggcagggagaggtagaaggggtggaggagtcaggaggaataggccgcagcagccctggaaatgatcaggaaggcaggcagtgggtgcagggctgcaggagggccgggagggctaatcttcaacttgtccatgccagcagcccctttttttccagaccaagggctgtgaacccgcctggggatgaggcctggtcttgtggaactgaacttagctcgacggggctgaccgctctggcccagggtggtatgtaattttcgctcggcctgggacggggcccaggccgggcccagcctggtggagcgtccaggtctgggtgcgaagccaggcccctgggcggaggtgaggggtggtctgaggagtgatgtggagttaaggcgccatcctcaccggtgactggtgcggcacctagcatgtttgacaggcggggactgcgaggcacgctgctcgggtgttggggacaacattgaccaacgctttattttccaggtggcagtgctccttttggacttttctctaggtttggcgctaaactcttcttgtgagctcactccaccccttcttcctccctttaacttatccattcacttaaaacattagctggtcatctggtaagcccgggacagtaagccgagtggctgttggagtcggtattgttggtaatggtggaggaagagaggccttcccgctgaggctggggtggggcggatcggtgttgcttgcctgcagagagggtggggagtgaatgtgcaccccttgggtgggcctgcagccatccagctgaaagttacaaaaatgcttcatggaccgtggtttgttactatagtgttcctcatggcgagcagatggaaccgggagacatggagtccctggccagtgtgagtcctagcattgcaggaggggagaccctggaggagagagcccgcctcaattgatgcctgcagattgaatttccagaggcttaggaggaggaagttctccaatgttctgtttccaggccttgctcaggaagccctgtattcaggaggctaccatttaaagtttgcagatgagcttatggggggcaatcttaaaaagtccacagcagatgcatccggctcgaggggccatcagctttgaataaatgcttgttccagagcccatgaatgccagcaggcacccctcctttcctggggtaaaggttttcagatgctgcatcttctaaattgagcctccggtcatactagttttgtgcttggaaccttgcttcaagaagatccctaagctgtagaacattttaacgttgatgccacaacgcagattgatgccttgtagatggagcttgcagatggagccccgtgacctctcacctacccacctgtttgcctgccttcttgtgcgtttctcggagaagttcttagcctgatgaaataacttggggcgttgaagagctgtttaattttaaatgccttagactggggatatattagaggaagcagattgtcaaattaagggtgtcattgtgttgtgctaaacgctgggagggtacaagttggtcattcctaaatctgtgtgtgagaaatggcaggtctagtttgggcattgtgattgcattgcagattactaggagaagggaatggtgggtacaccggtagtgctcttttgttcttgcttcgtttttttaaacttgaactttacttcgttagatttcataatactttcttggcattctagtaagaggaccctgaggtgggagttgtgggggacggggagaaggggacagcttggcaccggtcccgtgggcgttgcagtgtgggggatgggggtatgcagcttggcactggtactgggagggatgagggtgaagaaggggagagggttggttagagatacagtgtgggtggtgggggtggtaggaaatgcaggttgaagggaattctctggggctttggggaatttagtgcgtgggtgagccaagaaaatactaattaataatagtaagttgttagtgttggttaagttgttgcttggaagtgagaagttgcttagaaactttccaaagtgcttagcaactttaaatgcaaacagacaaactaacaaacaaaaattgttttgctttgctacaaggtggggaagactgaagaagtgttaactgaaaacaggtgacacagagtcaccagttttccgagaaccaaagggaggggtgtgtgatgccatctcacaggcaggggaaatgtctttaccagcttcctcctggtggccaagacagcctgtttcagagggttgttttgtttggggtgtgggtgttatcaagtgaattagtcacttgaaagatgggcgtcagacttgcatacgcagcagatcagcatccttcgctgccccttagcaacttaggtggttgatttgaaactgtgaaggtgtgattttttcaggagctggaagtcttagaaaagccttgtaaatgcctatattgtgggcttttaacgtatttaagggaccacttaagacgagattagatgggctcttctggatttgttcctcatttgtcacaggtgtcttgtgattgaaaatcatgagcgaagtgaaattgcattgaatttcaagggaatttagtatgtaaatcgtgccttagaaacacatctgttgtcttttctgtgtttggtcgatattaataatggcaaaatttttgcctatctagtatcttcaaattgtagtctttgtaacaaccaaataaccttttgtggtcactgtaaaattaatatttggtagacagaatccatgtacctttgctaaggttagaatgaataatttattgtatttttaatttgaatgtttgtgctttttaaatgagccaagactagaggggaaactatcacctaaaatcagtttggaaaacaagacctaaaaagggaaggggatggggattgtggggagagagtgggcgaggtgcctttactacatgtgtgatctgaaaaccctgcttggttctgagctgcgtctattgaattggtaaagtaataccaatggctttttatcatttccttcttccctttaagtttcacttgaaattttaaaaatcatggttatttttatcgttgggatctttctgtcttctgggttccattttttaaatgtttaaaaatatgttgacatggtagttcagttcttaaccaatgacttggggatgatgcaaacaattactgtcgttgggatttagagtgtattagtcacgcatgtatggggaagtagtctcgggtatgctgttgtgaaattgaaactgtaaaagtagatggttgaaagtactggtatgttgctctgtatggtaagaactaattctgttacgtcatgtacataattactaatcacttttcttcccctttacagcacaaataaagtttgagttctaaactcattagaattgttgtattgctatgttacatttctcgacccctatcacattgccttcataacgactttggatgtatcttcatattgtagatttaggtctagatttgctagctccaagtaattaaggccatgtaggagagcatggtaaccacagatagaactggtattatcccaagtggtctgcagactgctgagtggggatgggatctgctctctgttgagagttggtaatcattggtttgaaatgtgatgaaaccactcaagccaatgaaggtgggtgtgtaggtggggagtactttgccataatattttaaaacattacctggttagagttctaagtggtacttatttttgtttggttaggggaaagcctgaataaaaacagaaatggacacataatatgcatattccatagtctttgggaggctggaatgtgcctgggatttgggtctaagtgtatgcgtaattcttacctcactaaagaatttgccttgtttttttccttttggtgagtgactaaaacgtctgggcttccctgtgtgcgtgctacagtaagcaagcagaggctgtgcaaaggtgtgagcaggatcacgtggaatctggaggatacatcttggcttgcaaactgcctctgtctcctgggtgggactgttctgtccttgcactgctgttctgtgttacctcttggggtgtaaggttttgcttacaggagacaaactttgggcgtagaatggaagccactgccagcctctgtgctgagaaggaaggtgcttgtttcaaagggagcagcaagggaggcttgttctactcacctgggcctgtttgcctgagaaggggagataagggctgaactgggactagccagggggaccaacacaaatggtgggggatcatgacctgaaggattctttccttcccatgagctgcagggctggttgccgtccttgcaactgtgtcttatttgcctgtgccgttatatcttggtgacccctccacgtgtacactactgacaaacgggtggagtgctggggagaagtcactgtgccgcccacctagtaaaccttctgtctgtgctcatggcatctccaagatggggcactgctgtgtgcagaatccagggtcctctttctgcttgcaactcctttccctggatgccccagaaacaatccaggcctcctttcctatcttacccctttgctttgctttttaccccagcacctctataaccgccttctcttcttttcagaactccttgtttctcatcctgttttttatgattacaaaactcttgcttccaccctggaagataactgctatagatgcctgtatgtaaatggtgctgtctccagcaactggcatgctgaagaagaattgattcacggggtataaatgttggggattggaagtggggatgaaatggcacttgttgatacaggagcagagaggtgaggccgactgctgaagacagctcgccaccctccttgcctccactccaatccaggggctggggccacattctttgccttcatttatcctcagatcaggtgagatcgacaggaggtgttgatggcagtgccagcaattattgctaatccgtttgcatccttatgcatagatctgaattcagactttgtgaatttccagaggtgtgggtaatataatagaattcagtgagtgggcatggctgatcttgtgcaaattaaaagttatggggcataagaatagcaaaagttgaacttcttttaaaaaggaaagtaccctgagagccagtattggttgaggctcttcagtatgcccaggttggcagcactgagaaccgcaggaacggcctgttgttacaaaaaggagattgactcagctgcccttggtgcatctgactgactatgactgctgagagattccaaggacccttaatgccagggctaacctctccatgtgcagtgagacctctggaggaagtgtcatcctctggctttgtgtggtactcattatggtgcagtgcgggcatgaaatgaagacacccaaataggcttacagatacgatatgttttaaatgttcgtatttaacaaaaacatactgacactgtttggaaatggcaacaggaagatagcaaaatgaatactaacattacgaaaagatgaacaggtacatgttccaaggcaggtggctgtgaacttcctctgagtgaaggcatcccctccagcacctttcagcctgctagttaggacgacccgccgccaccctccaggacctccagccctgcactgcctttcctctcttttaaataattcttcattgagttctaatatgtaaaaaaaaaaagtttactgtaaagtttgcaaataaggaaattttttttaaaagtcctcagtaatcttaccagtaacaattgttatgggcacatttgcttttggaagatttcttttgtatgcatgggataagtacatttttaaacaaaaatgggattatgccataaattctattttgtgactttaatatatagtgaacaccttttttaatgatgacaggatgttcccttgcatggctgtatcaatttaaacaatcttgtttcaatgggcatacagggtattttctagtttttttttcctcttagaaaataatacttgcgatgactttccttgtagctcagactttttcacgtctgttgttatctctttgggaatgctgaatacatacatttcgagaaggaaatgactgttaaactcttaagacttcaggttcatattgctaaactgcccagcagggagggattttttcaattagtgttctcactggtgaggcaaacctgatgccttcccctcttcctcagaaccggctttatcacattgaaaacctttgctcctccgacggatcgagtctgctttccctgtggatgtgagcattgctttgtctgctggtgactgaacatctctaccatgtgtcaattggccatttgtcgtgtgtgtgtgtgtgcgtgtgtgtgtgtgtgtgtgtgtgtatgattttctaattcctagtcatttttctattgattgttttgcaaaagccatttacatcttaaggatattgataatcttttgttatatttgatgcaaatatttttttccagtttataggttgccttttaattttgtgtttcaggtagataaaagttaaacgattttcttaggttagtttatcactgtggtttctgaacttgttatgtgtagatcttttccaccccaagagtacataaatattaatccatactttcttatggaacttgtatggtttcgttttttacatttaaaccttcttccccgtggtgtgtgttgtggaatctgtgtttgtgtgaggaggggcatggtgctctcagaacccacctcctgtggccagagagccctgtcctgtgagggtggttatcacagtggcagggttcaattcagaagaccttgagggcaggctgatgtttcctgaatgggcccctggttgttgcttgtccctgactctccatttccccatctgagtggatttggacctaatagggcactggagctggttcgaatcctgactggactacttggcaactttatgtctgggagcaagttacttaacctccccaagcctgtgtctgtgaaatgcgggtaaatgaatgtagatgtttggcagcagctactccttgttgagctctcacagtgaactctcctgcctctgccctccttccccgcctcccctggtgcctagcgtcaggtctagccacttcctcctgggcccctctcccttttctgtggctggctgcctgcccgcctggcgctggacctttcatgtaacgggaatcagcatgtatattctggtctggtctgtttctacacttaattttgtttccagtagtatttccctgtaccggcagagttcacaaacacatttgaagaggctttttctcaggattcttaaccttcccaaaggaagtcccatggatgggtttctagaagtctataaatgctctgaaattgtatttttctgtggaaagcataactttcatctgcttgttcgtgctcaaaaaagatcatgaatgaatgattgcatgattttatgccattgtgcttatactaaaggatatgtagcccatctcttgagctgttaaactgttttgactactttaaatcgtgcagctgtgagcatctctgtaaatttagtgtacacatgtatcccctggagtggcattgcctcggcagtgagcacttatggttttataactctcttcacagactcaaatgactccagaaagctacacttcctgttgtgagtatatgatatccatttccctacatagccactaacatcaggtttttacaattttatttatttcttgctactttaagaaatttttgtggtgaaatacatataatagaagttgactatctgaatcatttttaagtatacattcagtagtgttaagtatgtcgccattgttgtacaaccaatctccagaactttttcatcttgcaaaacaaactctgtacccattaaataacattaaacattccattccctccagcctcagcaaccccattctactttctgtttctgtgagtttgactattccaagcacttcatatcagttaaatcatgaagtatttgtctgtctgtgactggcttatttctctgagcacagtgtcctcgagatgcgtctatgttgtagcatatgtcagaatttccttcctttttaaaagatccaaataatattcttattttatatcttttttttatccattcatccattagtggacacttgggttgcttttggctattgtaaataatggtgctatgtacaaatatctatattattgtatttacaagtataatgctgtaatgtacacacatctttttgagatcctaccttcagttcttttgagtatatagccagaagtggtattactaaatcttacgatatttctatttttaatttattgaggaaccactgtagtttttcatagcaactgcaccattttacgttctcaccaagagtgcacaagggttccgaggttcccacatcctccccaacacttgttattttctgctttttttagattgcagccatcatagtgggtgtgaggtgacatttcattgtggttttgatttgcatttccctaatgaggagtgatgctgagcatcttttcatatgcttactggtcatttgtatgttgtctttggaaaaatgtctattcaagtcctttgactattttaaaaattgggttattagagttatcgttgttgttgacttgtaggagtttctttctatattctggatattaatcccctatcagatatatgatttgcaaatatcttctcttattccataaggttactttttcactttgttgattgtgttctttgatgtatagaagtttttagttttgaaatagtctaatttatctgtttttacttttgtggtctgtgcttttggtgtcatatccaagaaatccttgccaaatccaacgttataaggtacttttaaggtattttagttgtcttagtctatatttctgtactcacctttctttatccactcatcagttgatgggcatgtaggttggttccatatctttgcaattctgaattgtgctgtgatcaggtgtctttttagtataatgatttactctcctttgggtagatacccagtagtgggattgctggatcgaatggtttttataattttctattttaccacagtttctctctgcatttttcctctttgaccactaaccatgtgaaattctcatattgacctttataatgatcatgaactcttagtatcattgggaaggccacatttgccacttatgattgtaaaccttatcctccatttttcctgttattgttggtgcaaaaagcacctattataccaggactttaaaaatcagtctgataagtctttgataagtctaataataataactgataagtccattgaatttgcttctgattactttttctttagtagctaaacatgtatgtactcctatgattacaatgaacactcctctccatttaaattaattatttacattgatgaaatagcaaaatgttaatgactaaatactgtcttggttttttcgttccaggtcagtcaatattaacttcttataattttcttttttttctttatgtgtgtgtgtgtgtgtatttttttttttttaatttcaatggctttgggggtacaaatggcttttggtcatatagatgaattctacagtagtgaagtctgagattttactgcaccggtcacctgagtagtgtacattgtacccaatatgtggttttttataccttgcccccctcttaccctccccactttgagtctctagtgtccattatgtcactctgtataccttttggtacccatcagttagctctcacttataagtgagaaccaccactgtatttggttttccattcctgagtggcttcacttagaataatatcctccagctccatccaaaattgctgcaacaaaaa

SEQ ID NO: 13012 - DNA, 701 bp, Homo sapiens
gcacagggaggggtgcatgtcaggcccagccctgcctgctgataccacctcacagacgcaggcgaaatgtcttcaccagcttcttctcggttgccaagggggcctgctttcaaggggttgttttgtatggggtgtgggtgttaaccagggagaggttcctggcaggagttcctgtcagatgccattttccattctggttacttgaaccggggtcctttttcatcctctacctcaggggccagagcttcctcatcaccctgcaccccctagcaagggaggtgcccgctacacggtccaaagtcctctccagacattcgggccctgcccgccttgctggagggctcaggagttcaccaggtttgcttccagaagagccaggctggggatgcctgcttgcaaatgcagcaaataaaaaataaataaataaataaaaatcacctttctccccacccccacccaaatgtaaaatgagccgacagcctgtccctcggctatgtcagatactgctttccgcacaatatcttggttttacattattttgcaacggcctcttcccacttaatccatcctgaacacacttcttgaatgttctaccccggcagggatgcgcattctcaggaaacacgtcccctcgccaggcccctgggaagagtcaaaaccacgatgcctgcccctgaagcgcccgcgcggctccacggggc

SEQ ID NO: 13013 - DNA, 1608 bp, Homo sapiens; identical to SEQ ID NO: 11817

SEQ ID NO: 13014 - DNA, 701 bp, Homo sapiens; identical to SEQ ID NO: 13012

SEQ ID NO: 13015 - DNA, 14717 bp, Homo sapiens
cgtggctgagaagaaggaggcctgagagcgacatgtccccggcggctcaggcggagcggcccgtggcgctgtttttctgagtccggggtggcctggcagccggccgaggacgagggtcggcgggggctgcccccgtggtggtggccgccatgctgggagcctgggcggttgagggaaccgctgtggcgctcctgcgactgctgctgctgctgctgccgccggcgatccggggacccgggctcggcgtggccggcgtggccggcgcggcgggggccgggctgcccgagagcgtcatttgggcggtcaacgcgggtggagaggcgcatgtggacgtgcacgggatccacttccgcaaggaccctttggaaggccgggtgggccgaggtgagagtccccctgccgagccgcgggatccagggcctgctgtgctgggcgcagccggccgggggctgcgggccccgagcccctttcgaccctggggccgcgtctctggagcgaagtttctctctgcagcttcttcgggggcccgctctgagctcagggcctggcactggctccaaggtacctagagtcatacaggcagagagttggccagaagttagttatatttggatttctcatcctgcattttctcaacccctcactcccatccaagctgggagagaaatgacgaaggcggccttttgctacctccaggcctcgcgggttgtaggtcatgggtgcccctgcttctcctgtcgagacagttcttgggagattctcgtcgacccaggaatcggccgctttccttgccccttctgcaggagcggggcttgattcttagccagaataggaaggaatcttcgaagagaatgggccaggaaagtttgattgtagcctcctcccccgccctcttttcgagcgaagaatatgtgtgcttaaaagtagaatcggcaggccgcccccagagggtggttctatcgaagccatcctgcacgtgaggctggtggctgtgtgtgaactgggtcaaccagtgtaagaatccgaatggtctatcagagaatgcttacaacctcccctaggtgatcctgagagttctaattccagcttagggggaaaatgattgtgacttaacttgctgggcaacagtggtttttaacggagctgctcccttcccaaagttagtgtgtgtcagaattgccagggcagctggttaaaaatgcagattcctagtccccactcgaaattgattatagtagattgagcttttttgctgggatccaggtttctgcaccaggggcttgtgatgtaggttgccccgagaccaccgttttggaagatcagctttataatctttgtttcttctgttggagggattggaaaacaggtttcagaaggaagttctttgctaggagattgatactgtatgctgggttcagaggctaccaaattggcagtatgccacctccagacaaccaggagacagactcactcttcactttctctcattctttttctgcgatgcccagatttggctcttgcttttactaaaatagttagttcttcccaagtcgattgcagtgtcctggagtttgttatattaaggagtttattgcctttcacacatgtgagggtcttgggacacagggctgttttgtgaagttctatgtttgtcttggagtttgttgagccctggcatgtagatcacagtagcctgggttcagctgactcagggctccagtctttagcagcggtaacagcagccaaagccagactttatagcaggaggtcattactatctctatcctggacccttcctctttcttcacgagtgtgggcagggaggaaagagcccttgaggaaactagacagtttgtggactttgcctcttgagatagcggtggtgagggtgctgagcggatggtttctttcacttagcagataccaggccttacattggttacatcgtcctattcagtctgttgtgcagagaataaagccgagtaagaccacacaggtttagttcccagatactgcccttattcagaaattctggttttaatttgctgatgcaggtggtgtgtgtgtgtgtgtgtgtgtgtgtgtgtttctttggcttggtcagcagtcagccaagatctgtgtccttgggttattggctcatggttgcagttccttggaaggagtttattgtagcaggtaaaattacatgagacctaccaaagcttgtgtgtactggagtcctatttcggacactggcccttggggcattgtataaatgaaggttccctgctaaggttcccctctccattctaccaatctgggtaagaattggagcagtattaaggcatggatggggagtgggaggtggcgcttgtcagctgcagtttggaccagcttgttgcaacattgcgcttaccaggttcctgagaaaggcattttgctggctttaggtcgggctgagatgcgcataagcttgcactctcaggaggcagctctctactaaggagtcagtcctaccaagggaagtccagctgttcacactgcctttcttctgggcctgtttggataagggtgtgccaggtatttgaagacccttgcctcgtgcagctatttacactgattgcagtaggaactgtatgccttatttcttttcccgcctgcctgtgatattgtttccagcatgctgagaaaagttgattttatgttgaatgaattcaggtatttgttaccaagttagtccagataagggtttggccttcttttgaacttgctgtttctgtgtagtttctttgtagttcaacattcttgtaattgtgagtggcccagggcacctagtggtttatgctttcaaaagcagttcagaatatttattgaatttcatttctgccttgaggatagctagtgcttacagcctgggaaaggctttttcagcctgtgtgcttccacagatgggagcaccactacagaaagtggtttagaagcgttcaccttggggttttggtatgaggcacattccagggtttttatttatttattgaaaatttttaattttttttttattgtagacacaggggtctcactatgttgcccaggctggtcttgaacttctgtcctcaagtgatcttcccaccttggcctcccaaactgctgggattacaggcatgaaccatcacgcctgaccatgttccagatttgtaacttggtcattttgagttcctcttcactctgactaggaaaagacctggttatttgacctgagggcacagaattttgcttgagtttagggaaggctatttcctcttcagagaaagatacctgctaaagtcgcaggtcctcgagaaacttgctttacgtctctgagccttgttttccttttcaaaaaatctctcatgctttagaaatttctgataagactgtaaactctcctgtccagagtagcttgaagtgtctctgtcactttttttttccttgatgaccttttacatggaattaaaaatagggcagaacatagctccagaggggaaaaaagttggttggggaccagagcctatcaggttgctaatgctgtaaccttaaggaataccctttcctgggctgccttcctttcacctggggaaggatttggctttggggaggtaagagcttgaaacatgggatgagagaggagtcactgctacctctgatttgctcaaagccatggcagttgtttagaattctctacctctactgtcacctaacaggcaggcttcatctgcaggccttccaaatagtggaagttcacaggtagaaaatttaggtccctgaatccgtgggttcgctgtctcagcccattcagaacaattctttaggtactggcctcactggagaaagaagtgatccagaagaacagtctagtgaccaggagatctgagggtagggtgggagtgacgctagagcaccaaggggggctttacagctgtgttctcatggaggacaggcttctgctcattctggctttcccactcttgtggttcccagttgcagttttccagttagttttattacttccttttcttttgatccattccctaaactgccttgagtggaggcatttgtttagtgcttatcgtgtgcatatccttgcctggctagcatacccatgtttctgtgtctctctccgtgtgaggcattgtattgagctatttatacagattgttttatccttaccacaatgctgtgggataggtggtgtccccattttataggtgagaaaacagacctagagaaaacaacttgttcagtgacacttcgtgtatgtcttttcctgaaccctgtgctgaattttccaaggagcctagttactacattgtctaaaactaagaaagagcagacataatgtaggcccttcggcccccttcctttttggttaactgagttatgccaatttcagcagtatgctgactgtacacttcattgtattttagagaaatctgtttcgctgtgaatgcataaaggctaaggagggaggaacaacccttgtttgctgctgcatctcttgggacttgggcaaattcaactttgcacgtggcagatctcttgggaaagccacttgggttttaaagggaaatattttaaaggtaattccaaggttgttaagtaatttttgttcacatggttgagttttcttcactgtgggactgagactgccgcagattacgttactgtcagttcctcactttttccacttggcaagaaaaaaaaaaagattcggcctggtgtggtggctcacgcctataatcctagcactttgggaggccgatgcgggcagatcacctgaggttggagttggagaccagcttggctaacatagtgaaagcccgtttctactaaaaatacaaaaaattagccgggcgtggtgatgcgtgcctgtaatcccagctacttgggaggctgaggcaggagaatcgcttgaccctgggaggtggaggttgcagtgagctgagattgcgccattgcactccagcttgggcaacaagagcgaaactccgtctccaaaaaacaaaaacaaaaacaaaaaaacaattccccacccatgcacaaaattttctgtgtatccgtaaatcaaatgtagtcgatgttccagatttgtaatgatcacagtcctcatggaagaaggaaattcttagagctcagttggaagagaaacagcagtctttcagtcttcataggtttgtatcccggggcaatggttttttgaggctggaaaggagggggagcatgttagcagtacatcctttgtatgcattgctcagctactctttgatttcttgaggagaaatagaaagaaaaaagtctgaagacaaaagtgcaatgagtttcctcttccattgtctcatcagtccctctgatctcgtggctaatgtcacttacaggaactgttaacagttatgtttatttttttgaggtcttgacctcaaccactgggtctttttgttaatcttttaccttttgccatgtcttctcccttgttgatgattcagaagataaagctctggggatgacagcccctggccttctcccaaaggatctagttgccagatgtcttcagggtcaccacgtgagattggaaggcagtcttgaaatcttaatttcatgcgggaggagagactacatgacggctacatctgtagttggaacagtatatttatggagcactggaaagccttactgtgtttataggataaaggagtcaggctactctctggaggaagcagaactatttacctctgagactgaaatgtgatatcttatatttgcacaaaaaagattcggcctggcgcggtggctcacgcctgtaatcctagcactttgggaggccgatgcgggtggatcacctgcggtcaggagtttagtgtgttgtgcgagaggaagaaaaaaacatatatacaactgtcttacaccaaggttgggagagggccagggccaagagaggttttctgctcttctgatactgacccgaggtaagtaactttttacttttatcctctctcattccttgtcagtttgtgaaatgtgaaaggtgattcccctaggacttggacatcttaggcagattgccttgccctgcaggatgctccagccttgtggacagagtggcatggcttcactgctttgcaggcacctccttcattgtcatttattcattcagcaaactgtatgagtggcgactatgtgccaggtcccgtgctaggcactggaggtgcagtggtgactttttttttctgctgttggtttatctgagtgaatgttcaagtaagtaggtgaggtggagttttgtgagtctgtgggaaggaaggaaattagcatcacacctttcttttatgagcctgtttttgtttacagctttggaactttttgaatgaaaattataaaaaaaacacacaacaactaaagctggaattttattcgtaaggacaatgaagaatgactttccaaagcagatatcctgtttgttttagactctgggcttttctgaatgagagaaaacattctttgaacttcatcttgtatggagttcctggccatcccccttgttttaggaggtttctctgaagccctccctcttggggaaccaggcagctgcaacacagcactttcttctggtaatgagttagacttgttctccgtacagtcagggggaaaaagtcattttaatgtgcttttagaaagttccgctctgaggtttacaggggctgttggcctgattagtgtttagtttctttcattttactcttccatagtaatggctgtatgattcctgcctttgttggagctctgtttggagccaggtgcagagtgggtggccccttttatggagagggttattagcattgccctggaaatgcctctggctgttctggggtctttgcttttcttttgtgtcttgcctctgatgtgctttctctttgtcttttgtcctcagcctcagactatggcatgaaactgccaatcctgcgttccaaccctgaggaccagatcctgtatcaaactgagcggtacaatgaggagacctttggctacgaagtgcccatcaaagaggagggggactacgtgctggtcttgaaatttgcagaggtctactttgcacagtcccagcaaaaggtgaggcctagtcaggctgctgcttgaccagtaggacattgctgctcttggacaatccacgattatggggctagagagtgtgagagtctctccagaaaggcagaacagatgagctctagagaagcatgttccatagtgcacaaggctgcacttgccttgggggtgagtgacagaaagcaatgccagaatccttgttttgccaactaactgatcctgttaaggccctcctggctacttccctccatggtttgccgcaccttcttgtttttagccttatttttcctctgtcccttcctgtgaatttccttcttcctatgctaagctttttgtttgtattctttgttccttaaagccaatataagaactcctgggcagtgaaggaacacggctttgatttgacccgggttaaggatgctaaccaccctggatatccagacccatcatttcttaaattatttttgaacttcaagcccaaacacgtgcatgatgtccaactgcttgaaaggatgtaaagctgatggttttgacattgttttcttttcttatcctggaaggtatttgatgtacgattgaatggccacgtcgtggtgaaggacttggatatctttgatcgtgttgggcatagcacagctcacgatgaaattatacctatgagcatcagaaaggggaagctgagtgtccagggggaggtgtccaccttcacagggaaactctacattgagtttgtcaaggtaattcccctattctgcccattgctgaagagagtgggtacaggggaagttgtttgctgctgtgtggggttgaccactgtttcccttttcctaggggtactatgacaatcccaaggtctgtgcactctacatcatggctgggacagtggatggtaggttgtgttctgacctgcttttttgacttgagtggagggatatggttgaggaagcccttgggaggtaattgagctgatcactattttggaaacacttaaagctaaattgtaggggattcagaatcagttggataaggatgaagcataacatggtactagccacaagctttggagtcaggtctatgtatatcttgttgctgccatttaatcagatgtttgtcttggatggatgcttttaatttccctataaattgggattaataatggtacctattggtgtaccctgacctttgtagtcatttgggatcacctaaaacttgtccttattctgtttgtttgacatctctttcctaggggaaaaaaaggtaaaaggaggagtcctgtaggcttttggtatgctctgaaagattccagcattgctggactgcactgggacaaaacttcacttatttatgtctccttatccttgggatcaagtcttagagtatatttctttctcagggtttagattctcctggctgccagcatctcaggctgatttttgcagagaaagctgcgtctttgtgacatttctcccccattccacctctgtacctttccccaactcaatcttgaatgcactgaggatttcatcctgttgtcttgatgtcccccaaatgctgatattatgacatctaggaggatgaatgtcttaccaccaaacagacctgtgttcaagtccctgaggaggaggcaggacagagggatagtgtgtgctgggaacccagaactctctgggtcaacgtttcttcagttgttgtgtgaatcaaaagggaatgtgggcttgtgggaggaggagggatttgaaaaggctaaagtttaggcattggatcattgtccctgtccagtctggttatcttggggctctgtaaaagtagaacaggaaggtaagatagtgaacctccctatgagcacggctttttctactttctagttaaatctaaagcttttgcagcactctgctgttctgtagaccagaggctatttctgctacttctggtcttttctctggacccgggttcaatcacagcaatctctttattgtggcttatttgctgcttttaagggtctctcttacttaaatgctgtgggtcttaacagtgttttcttccttgtgttagatgtaccaaagcttcagcctcatccgggattggagaagaaagaagaggaagaagaagaagaagaatatgatgaagggtctaatctcaaaaaacagaccaataagaaccgggtgcagtcaggcccccgcacacccaacccctatgcctcggacaacagcagcctcatgtttcccatcctggtggccttcggagtcttcattccaaccctcttctgcctctgccggttgtgagaacaaatgactatcctgaacagggtggaggggtgtgggaaagaaaccagccatattggttttggtttctgtatttttcacaatgattaatgaacaaaaacaaagagaaaaaaacacacatcaattaaaggagacaaaaagaggcagagcgagtagagagcagccctcattcaccacctggtcccagacgtgcttcagtcctcgtcctctctttgtggctggctcccagccttctctttcctcttgaggatacttagggtaaactggatccttcctgctcaaggatcctcatttgtatacctagtggaaaggactctgaactcagaggagtcactgttcctttttttaggttagaaattaacagcagggaaatgccatcttattacctgagacgaccagcactgggagttaggtacggtctgaagttatgtctagataagacttcagacgtcctgggattgaaagaatgtgtgtgaaggggtagaatttgtgcggtaaagacttaaaaaaaaaagtagggagattaaaaaaaaagaaagaaaatgcttccttatctggaagcctttctggattaatccagtgatggtcccacctttagtgtttgagctttgtcattgcttgtctccctggcatgtgccagttatagactgtccagcatccaagacgtttcggttatgtcgggtcctcagatcgcctctgacttgttaccacaacaaatcattttgatttcagtgcctgttggggacttgatttcttctcagttttgtttgtttgtttgtttccttaatctggctcatttgaaatttcttctccctctcaaccatcccactaagttatagccaagaagggaaggagacacggggatttggggttctctgcttgaatgtcttctcctttaccacctcaccttgttggtacctccctccctggatctctgagccagcagccaggaggacctgacccagcagttctttactggcccctttgtagggccttgctgccagggggcagggatgctttccagcctgcagcaacagaacacttgaccttaaaagtctcttctggtctttggattagaaaaggcttatgttagcatagcttaagagcaacctcagagatttgagccctactaagtgactgaccactgtttagagtgtctggtatctgatgttcatttattcccatgttcttgtgtgtcacagttcagccagttttggtttatgcctagagctacttcaaggaactagactaattagctatataggcccagcgatgcttcttattgatcttaatagtatgcccctccttcccctgtcctttcatttctctatccaagtagcagtcaggttcttggtgtgatgggactgaaagaattccagtcagccagagccttggcagctctgaagctaaccttagcatctaagtgtcgatcttgaattccctgaaaaaatttctataggaaatgaagcttccctggtcccctcctttctggccattgtcatccatttcccagttagggcaacaatgaaggaggacccagccaagctagaaggaattttgtggatgggagacagcaggattagcttcagcttgggctggagcagtcaatataggatctcaggccaggcccgcttttctagaatgtgtttaattttgagtttgctttattagatatgttttttaagagctctgtatatttgaactgctccttatgtgacaaaataggtagctcttgggctcatgtcctgggttttggctctttaatgattactccaggccagcatttagtcgtttgagaattgtagcctgttgttttcgctgtgacttgggtctcagtgctagggtattgagtcaggcagctggagggttgtggcccgaggctgcagtcagaggtatacttcccatagtgcttcacacagctcccctgcttctaaaggataaggtactgtagccttggtcctggggaccacctgcctggggcagtggacatcctaactaaacaggcttctggcagtagctttggttcctatcccatcgaaattccccaaagccctgggccactgccattgggttagtcaagatgaaggaggaggactggctgcctccattttgccttgtttgttagtttgcctgggtctgtctgaggaaggagggggtcccgccttccacctcaacacatcccttcagtgactcagagtctcagaaggaaaccctgactcctggggccatttcctaatggtactgtaagccaagcagctttgcttctgcctctgtttccaagcccacccttttcccctgagctcagggttagggatgggcgctttcctctctggttgtgaacgaaaggaaggaacatctttctatggctaacaaaaactaaaggggaagtgaggaaacaggaagaagtatggtgggggctggggtagactcccctggagccaagcctatccagctaacaagagctccctggggctggtcacagctggctcatgatgctgaacttgaaagtttttttgtttttgtttttgttttgtggctcctccaagatataggtacatgaagtttaggttaaaggggtgggattctttatttttatttttgtattgtatgtgtcaagaattactctgttgttcaccttttgctttttgcactgtttgttctcttatctgtattttgagcttagtgctaggactgagaggctgcaccatagggaatgtatgggagatggtgaggggtgccagtgaggggtgcgtggaggagaggcctgggctcctctactggatctacactctgtcccaggtttttagatcccactgagcccagctgactgaaaacaaggacagtcagggtgaaacttcttttgccagaagtgtggcctgagttgaatttctgggaggatgacgcagatgtctgctgcagagctgggctgagagttctgcagtctagctctgacttaggtcaggggcctgttggtctctcattggacgtttttgggtctcactcatgcttactgaaacattgtgccaagaaactctgtgggatttgtgtcccttaaaccagactcacttttctgaaaaatctccattgttgaggagaggctgctcaatcgacaccccgagttctcatgactgggaagatagttttcttcaggtgtcaatggcgttagactcccaggaagactagccctgcccacagggccacctgttggtttgagagcgtgttcgtgttctcttgccctccctgcctaagagctactgggatcacgttagcgggcatttaggctttgatgagagggcacagtttgagttaggtttacctccccctttctgtgcctgggaactgtttggtccagctttagaactgtggttttgacttccttatctcttgggagaagcttctgttttaaggaatttctcttccttcttctcctgcctctagcctctcctggaaaggcctggatatggtttctaaaatctcagctgagaacttcagaaaacagcagcagtattttccttttcctagtgctaaaatccctttccctagaaattggctcaccttgggaaacccagggaaagaatcagcaggttctctgccctccctaggggttggggaaggacccaccccggtcagcacagtgccttttcctctcctgctctgagccagggtggggcattccctctagattcaggtttgggcaggggtcctatagtccctgccatggggctgcttccctgtcccttccctcccctttgctggcctactctggcataattcaagtgtcttcttgccttggggatccttagtggcatcaaatggcaacatggaatattgtcctccatgcccctccagaaggacctaggagagtaggtgagctttccaaagtgagagacgaatctttctttctttttttttttaaagggcaggatgggtatgctttgggctttctcctcctgtggccccggaggaaggagagactgaggcaaggcaaagtgatagtacactgaagcagaaccggaaacacccaggaactgttcagaaatctcagaagaaatctgcttctcttcgatggaaagatataattaacgatcaaagagctctaagaaaattgcaaagaagccttaatgttcaagctttagaaagatcagagcaatttttctctttcagtccaaactaagactctctgtatttaaatctctctggggcaagagggctagatttcctcattttgttatgagactagattggtaccagtagatcagctgcctagcgagggcaggtttcttctttgcatctgtgtggcttgcttccagtctggcctgtcctttccagctgccttttgtctagcctgctatggggggccagattatcttgataagagcaggtgatttggggactagctgggttggcaggaaaagagcaggatggatctcttgggacaggttcccccaggagtataaacacaaggagccaggattgtgctggcagccaaggaaacagtagtgcctgtttgagttggcagagagggccttggcacctcttgcatccaggcagtcttgtgagatgggggcacatagcactggggaaagcagaactccattctcacctctattttgagcttcagtgctttatttcagtatgaggaaaaacaacaacaaactgaagtgcgctttccgtcctttcaaaggacaactgtcgggaagggagagccgagttgcgaggtaggaggggagcactggcagggagagacattcttgactcctctcttccctggtgtgttgtgatccagggaatgaaaagaaatttgaccctggattggttctctccttggacttaaggaatcttaccttttccttccacaaagttctcccaggcaaggaccagctgcccattctgagcccagggcagcctcttcaaccattattggtctaacctggcttgtcaggaaaccaagcccacccttccacattgggcctggctgctctattctgtaccaagtactggagaaaaagcatcaagttcttagcccttgtagcttctaccctagtttcccatcctctctctgtggaggccaaaccaactctttgccagcagccacaacatgcattgacagcggcacagtgagatataactgatgggctttgaacctggttggccggggaagctgtaggggtggatagagctggctttccttctgggctgtctccatctgaccctaccccttccatgtcccaccccactcccaccaaaaagtacaaaatcaggatgtttttcactgtccattgctttgtgttttaataaacaatttgcagtgacactctg

SEQ ID NO: 13016 - DNA, 7871 bp, Homo sapiens
tagcattgccctggaaatgcctctggctgttctggggtctttgcttttcttttgtgtcttgcctctgatgtgctttctctttgtcttttgtcctcagcctcagactatggcatgaaactgccaatcctgcgttccaaccctgaggaccagatcctgtatcaaactgagcggtacaatgaggagacctttggctacgaagtgcccatcaaagaggagggggactacgtgctggtcttgaaatttgcagaggtctactttgcacagtcccagcaaaaggtgaggcctagtcaggctgctgcttgaccagtaggacattgctgctcttggacaatccacgattatggggctagagagtgtgagagtctctccagaaaggcagaacagatgagctctagagaagcatgttccatagtgcacaaggctgcacttgccttgggggtgagtgacagaaagcaatgccagaatccttgttttgccaactaactgatcctgttaaggccctcctggctacttccctccatggtttgccgcaccttcttgtttttagccttatttttcctctgtcccttcctgtgaatttccttcttcctatgctaagctttttgtttgtattctttgttccttaaagccaatataagaactcctgggcagtgaaggaacacggctttgatttgacccgggttaaggatgctaaccaccctggatatccagacccatcatttcttaaattatttttgaacttcaagcccaaacacgtgcatgatgtccaactgcttgaaaggatgtaaagctgatggttttgacattgttttcttttcttatcctggaaggtatttgatgtacgattgaatggccacgtcgtggtgaaggacttggatatctttgatcgtgttgggcatagcacagctcacgatgaaattatacctatgagcatcagaaaggggaagctgagtgtccagggggaggtgtccaccttcacagggaaactctacattgagtttgtcaaggtaattcccctattctgcccattgctgaagagagtgggtacaggggaagttgtttgctgctgtgtggggttgaccactgtttcccttttcctaggggtactatgacaatcccaaggtctgtgcactctacatcatggctgggacagtggatggtaggttgtgttctgacctgcttttttgacttgagtggagggatatggttgaggaagcccttgggaggtaattgagctgatcactattttggaaacacttaaagctaaattgtaggggattcagaatcagttggataaggatgaagcataacatggtactagccacaagctttggagtcaggtctatgtatatcttgttgctgccatttaatcagatgtttgtcttggatggatgcttttaatttccctataaattgggattaataatggtacctattggtgtaccctgacctttgtagtcatttgggatcacctaaaacttgtccttattctgtttgtttgacatctctttcctaggggaaaaaaaggtaaaaggaggagtcctgtaggcttttggtatgctctgaaagattccagcattgctggactgcactgggacaaaacttcacttatttatgtctccttatccttgggatcaagtcttagagtatatttctttctcagggtttagattctcctggctgccagcatctcaggctgatttttgcagagaaagctgcgtctttgtgacatttctcccccattccacctctgtacctttccccaactcaatcttgaatgcactgaggatttcatcctgttgtcttgatgtcccccaaatgctgatattatgacatctaggaggatgaatgtcttaccaccaaacagacctgtgttcaagtccctgaggaggaggcaggacagagggatagtgtgtgctgggaacccagaactctctgggtcaacgtttcttcagttgttgtgtgaatcaaaagggaatgtgggcttgtgggaggaggagggatttgaaaaggctaaagtttaggcattggatcattgtccctgtccagtctggttatcttggggctctgtaaaagtagaacaggaaggtaagatagtgaacctccctatgagcacggctttttctactttctagttaaatctaaagcttttgcagcactctgctgttctgtagaccagaggctatttctgctacttctggtcttttctctggacccgggttcaatcacagcaatctctttattgtggcttatttgctgcttttaagggtctctcttacttaaatgctgtgggtcttaacagtgttttcttccttgtgttagatgtaccaaagcttcagcctcatccgggattggagaagaaagaagaggaagaagaagaagaagaatatgatgaagggtctaatctcaaaaaacagaccaataagaaccgggtgcagtcaggcccccgcacacccaacccctatgcctcggacaacagcagcctcatgtttcccatcctggtggccttcggagtcttcattccaaccctcttctgcctctgccggttgtgagaacaaatgactatcctgaacagggtggaggggtgtgggaaagaaaccagccatattggttttggtttctgtatttttcacaatgattaatgaacaaaaacaaagagaaaaaaacacacatcaattaaaggagacaaaaagaggcagagcgagtagagagcagccctcattcaccacctggtcccagacgtgcttcagtcctcgtcctctctttgtggctggctcccagccttctctttcctcttgaggatacttagggtaaactggatccttcctgctcaaggatcctcatttgtatacctagtggaaaggactctgaactcagaggagtcactgttcctttttttaggttagaaattaacagcagggaaatgccatcttattacctgagacgaccagcactgggagttaggtacggtctgaagttatgtctagataagacttcagacgtcctgggattgaaagaatgtgtgtgaaggggtagaatttgtgcggtaaagacttaaaaaaaaaagtagggagattaaaaaaaaagaaagaaaatgcttccttatctggaagcctttctggattaatccagtgatggtcccacctttagtgtttgagctttgtcattgcttgtctccctggcatgtgccagttatagactgtccagcatccaagacgtttcggttatgtcgggtcctcagatcgcctctgacttgttaccacaacaaatcattttgatttcagtgcctgttggggacttgatttcttctcagttttgtttgtttgtttgtttccttaatctggctcatttgaaatttcttctccctctcaaccatcccactaagttatagccaagaagggaaggagacacggggatttggggttctctgcttgaatgtcttctcctttaccacctcaccttgttggtacctccctccctggatctctgagccagcagccaggaggacctgacccagcagttctttactggcccctttgtagggccttgctgccagggggcagggatgctttccagcctgcagcaacagaacacttgaccttaaaagtctcttctggtctttggattagaaaaggcttatgttagcatagcttaagagcaacctcagagatttgagccctactaagtgactgaccactgtttagagtgtctggtatctgatgttcatttattcccatgttcttgtgtgtcacagttcagccagttttggtttatgcctagagctacttcaaggaactagactaattagctatataggcccagcgatgcttcttattgatcttaatagtatgcccctccttcccctgtcctttcatttctctatccaagtagcagtcaggttcttggtgtgatgggactgaaagaattccagtcagccagagccttggcagctctgaagctaaccttagcatctaagtgtcgatcttgaattccctgaaaaaatttctataggaaatgaagcttccctggtcccctcctttctggccattgtcatccatttcccagttagggcaacaatgaaggaggacccagccaagctagaaggaattttgtggatgggagacagcaggattagcttcagcttgggctggagcagtcaatataggatctcaggccaggcccgcttttctagaatgtgtttaattttgagtttgctttattagatatgttttttaagagctctgtatatttgaactgctccttatgtgacaaaataggtagctcttgggctcatgtcctgggttttggctctttaatgattactccaggccagcatttagtcgtttgagaattgtagcctgttgttttcgctgtgacttgggtctcagtgctagggtattgagtcaggcagctggagggttgtggcccgaggctgcagtcagaggtatacttcccatagtgcttcacacagctcccctgcttctaaaggataaggtactgtagccttggtcctggggaccacctgcctggggcagtggacatcctaactaaacaggcttctggcagtagctttggttcctatcccatcgaaattccccaaagccctgggccactgccattgggttagtcaagatgaaggaggaggactggctgcctccattttgccttgtttgttagtttgcctgggtctgtctgaggaaggagggggtcccgccttccacctcaacacatcccttcagtgactcagagtctcagaaggaaaccctgactcctggggccatttcctaatggtactgtaagccaagcagctttgcttctgcctctgtttccaagcccacccttttcccctgagctcagggttagggatgggcgctttcctctctggttgtgaacgaaaggaaggaacatctttctatggctaacaaaaactaaaggggaagtgaggaaacaggaagaagtatggtgggggctggggtagactcccctggagccaagcctatccagctaacaagagctccctggggctggtcacagctggctcatgatgctgaacttgaaagtttttttgtttttgtttttgttttgtggctcctccaagatataggtacatgaagtttaggttaaaggggtgggattctttatttttatttttgtattgtatgtgtcaagaattactctgttgttcaccttttgctttttgcactgtttgttctcttatctgtattttgagcttagtgctaggactgagaggctgcaccatagggaatgtatgggagatggtgaggggtgccagtgaggggtgcgtggaggagaggcctgggctcctctactggatctacactctgtcccaggtttttagatcccactgagcccagctgactgaaaacaaggacagtcagggtgaaacttcttttgccagaagtgtggcctgagttgaatttctgggaggatgacgcagatgtctgctgcagagctgggctgagagttctgcagtctagctctgacttaggtcaggggcctgttggtctctcattggacgtttttgggtctcactcatgcttactgaaacattgtgccaagaaactctgtgggatttgtgtcccttaaaccagactcacttttctgaaaaatctccattgttgaggagaggctgctcaatcgacaccccgagttctcatgactgggaagatagttttcttcaggtgtcaatggcgttagactcccaggaagactagccctgcccacagggccacctgttggtttgagagcgtgttcgtgttctcttgccctccctgcctaagagctactgggatcacgttagcgggcatttaggctttgatgagagggcacagtttgagttaggtttacctccccctttctgtgcctgggaactgtttggtccagctttagaactgtggttttgacttccttatctcttgggagaagcttctgttttaaggaatttctcttccttcttctcctgcctctagcctctcctggaaaggcctggatatggtttctaaaatctcagctgagaacttcagaaaacagcagcagtattttccttttcctagtgctaaaatccctttccctagaaattggctcaccttgggaaacccagggaaagaatcagcaggttctctgccctccctaggggttggggaaggacccaccccggtcagcacagtgccttttcctctcctgctctgagccagggtggggcattccctctagattcaggtttgggcaggggtcctatagtccctgccatggggctgcttccctgtcccttccctcccctttgctggcctactctggcataattcaagtgtcttcttgccttggggatccttagtggcatcaaatggcaacatggaatattgtcctccatgcccctccagaaggacctaggagagtaggtgagctttccaaagtgagagacgaatctttctttctttttttttttaaagggcaggatgggtatgctttgggctttctccttctgtggccccggaggaaggagagactgaggcaaggcaaagtgatagtacactgaagcagaaccggaaacacccaggaactgttcagaaatctcagaagaaatctgcttctcttcgatggaaagatataattaacgatcaaagagctctaagaaaattgcaaagaagccttaatgttcaagctttagaaagatcagagcaatttttctctttcagtccaaactaagactctctgtatttaaatctctctggggcaagagggctagatttcctcattttgttatgagactagattggtaccagtagatcagctgcctagcgagggcaggtttcttctttgcatctgtgtggcttgcttccagtctggcctgtcctttccagctgccttttgtctagcctgctatggggggccagattatcttgataagagcaggtgatttggggactagctgggttggcaggaaaagagcaggatggatctcttgggacaggttcccccaggagtataaacacaaggagccaggattgtgctggcagccaaggaaacagtagtgcctgtttgagttggcagagagggccttggcacctcttgcatccaggcagtcttgtgagatgggggcacatagcactggggaaagcagaactccattctcacctctattttgagcttcagtgctttatttcagtatgaggaaaaacaacaacaaactgaagtgcgctttccgtcctttcaaaggacaactgtcgggaagggagagccgagttgcgaggtaggaggggagcactggcagggagagacattcttgactcctctcttccctggtgtgttgtgatccagggaatgaaaagaaatttgaccctggattggttctctccttggacttaaggaatcttaccttttccttccacaaagttctcccaggcaaggaccagctgcccattctgagcccagggcagcctcttcaaccattattggtctaacctggcttgtcaggaaaccaagcccacccttccacattgggcctggctgctctattctgtaccaagtactggagaaaaagcatcaagttcttagcccttgtagcttctaccctagtttcccatcctctctctgtggaggccaaaccaactctttgccagcagccacaacatgcattgacagcggcacagtgagatataactgatgggctttgaacctggttggccggggaagctgtaggggtggatagagctggctttccttctgggctgtctccatctgaccctaccccttccatgtcccaccccactcccaccaaaaagtacaaaatcaggatgtttttcactgtccattgctttgtgttttaataaacaatttgcagtgacactctg

SEQ ID NO: 13017 - DNA, 2775 bp, Homo sapiens
  SITE (40): n equals a,t,g, or c
  SITE (76): n equals a,t,g, or c
  SITE (1036): n equals a,t,g, or c
ggaaacaggaagaagtatggtgggggctggggtagactcncctgaagccaagcctatccagctaacaagagctccntggggctggtcacagctggctcatgatgctgaacttgaaagtttttttgtttttgtttttgttttgtggctcctccaagatataggtacatgaagtttaggttaaaggggtgggattctttatttttatttttgtattgtatgtgtcaagaattactctgttgttcaccttttgctttttgcactgtttgttctcttatctgtattttgagcttagctgctaggactgagaggctgcaccatagggaatgtatgggagatggtgaggggtgccagtgaggggtgcgtggaggagaggcctgggctcctctactggatctacactctgtcccaggtttttagatcccactgagcccagctgactgaaaacaaggacagtcagggtgaaacttcttttgccagaagtgtggcctgagttgaatttctgggaggatgacgcagatgtctgctgcagagctgggctgagagttctgcagtctagctctgacttaggtcaggggcctgttggtctctcattggacgtttttgggtctcactcatgcttactgaaacattgtgccaagaaactctgtgggatttgtgtcccttaaaccagactcacttttctgaaaaatctccattgttgaggagaggctgctcaatcgacaccccgagttctcatgactgggaagatagttttcttcaggtgtcaacggcgttagactcccaggaagactagccctgcccacagggccacctgttggtttgagagcgtgttcgtgttctcttgccctccctgcctaagagctactgggatcacgttagcgggcatttaggctttgatgagagggcacagtttgagttaggtttacctcccccttctgtgcctgggaactgtttggtccagcttagaactgtggttttgacttcctatctcttgggagaagcttctgttttaaggaatttctcttccttcttctcntgcctctagcctctcctggaaaggcctggatatggtttctaaaatctcagctgagaacttcagaaaacagcagcagtattttccttttcctagtgctaaaatccctttccctagaaattggctcaccttgggaaacccagggaaagaatcagcaggttctctgccctccctaggggttggggaaggacccaccccggtcagcacagtgccttttcctctcctgctctgagccagggtggggcattccctctagattcaggtttgggcaggggtcctatagtccctgccatggggctgcttccctgtcccttccctcccctttgctggcctactctggcataattcaagtgtcttcttgccttggggatccttagtggcatcaaatggcaacatggaatattgtcctccatgcccctccagaaggacctaggagagtaggtgagctttccaaagtgagagacgaatctttctttctttttttttttaaagggcaggatgggtatgctttgggctttctccttctgtggccccggaggaaggagagactgaggcaaggcaaagtgatagtacacggaagcagaaccggaaacacccaggaactgttcagaaatctcagaagaaatctgcttctcttcgatggaaagatataattaacgatcaaagagctctaagaaaattgcaaagaagccttaatgttcaagctttagaaagatcagagcaatttttctctttcagtccaaactaagactctctgtatttaaatctctctggggcaagagggctagatttcctcattttgttatgagactagattggtaccagtagatcagctgcctagcgagggcaggtttcttctttgcatctgtgtggcttgcttccagtctggcctgtcctttccagctgccttttgtctagcctgctatggggggccagattatcttgataagagcaggtgatttggggactagctgggttggcaggaaaagagcaggatggatctcttgggacaggttcccccaggagtataaacacaaggagccaggattgtgctggcagccaaggaaacagtagtgcctgtttgagttggcagagagggccttggcacctcttgcatccaggcagtcttgtgagatgggggcacatagcactggggaaagcagaactccattctcacctctattttgagcttcagtgctttatttcagtatgaggaaaaacaacaacaaactgaagtgcgctttccgtcctttcaaaggacaactgtcgggaagggagagccgagttgcgaggtaggaggggagcactggcagggagagacattcttgactcctctcttccctggtgtgttgtgatccagggaatgaaaagaaatttgaccctggattggttctctccttggacttaaggaatcttaccttttccttccacaaagttctcccaggcaaggaccagctgcccattctgagcccagggcagcctcttcaaccattattggtctaacctggcttgtcaggaaaccaagcccacccttccacattgggcctggctgctctattctgtaccaagtactggagaaaaagcatcaagttcttagcccttgtagcttctaccctagtttcccatcctctctctgtggaggccaaaccaactctttgccagcagccacaacatgcattgacagcggcacagtgagatataactgatgggctttgaacctggttggccggggaagctgtagg

SEQ ID NO: 13018 - DNA, 14719 bp, Homo sapiens
cgtggctgagaagaaggaggcctgagagcgacatgtccccggcggctcaggcggagcggcccgtggcgctgtttttctgagtccggggtggcctggcagccggccgaggacgagggtcggcgggggctgcccccgtggtggtggccgccatgctgggagcctgggcggttgagggaaccgctgtggcgctcctgcgactgctgctgctgctgctgccgccggcgatccggggacccgggctcggcgtggccggcgtggccggcgcggcgggggccgggctgcccgagagcgtcatttgggcggtcaacgcgggtggagaggcgcatgtggacgtgcacgggatccacttccgcaaggaccctttggaaggccgggtgggccgaggtgagagtccccctgccgagccgcgggatccagggcctgctgtgctgggcgcagccggccgggggctgcgggccccgagcccctttcgaccctggggccgcgtctctggagcgaagtttctctctgcagcttcttcgggggcccgctctgagctcagggcctggcactggctccaaggtacctagagtcatacaggcagagagttggccagaagttagttatatttggatttctcatcctgcattttctcaacccctcactcccatccaagctgggagagaaatgacgaaggcggccttttgctacctccaggcctcgcgggttgtaggtcatgggtgcccctgcttctcctgtcgagacagttcttgggagattctcgtcgacccaggaatcggccgctttccttgccccttctgcaggagcggggcttgattcttagccagaataggaaggaatcttcgaagagaatgggccaggaaagtttgattgtagcctcctcccccgccctcttttcgagcgaagaatatgtgtgcttaaaagtagaatcggcaggccgcccccagagggtggttctatcgaagccatcctgcacgtgaggctggtggctgtgtgtgaactgggtcaaccagtgtaagaatccgaatggtctatcagagaatgcttacaacctcccctaggtgatcctgagagttctaattccagcttagggggaaaatgattgtgacttaacttgctgggcaacagtggtttttaacggagctgctcccttcccaaagttagtgtgtgtcagaattgccagggcagctggttaaaaatgcagattcctagtccccactcgaaattgattatagtagattgagcttttttgctgggatccaggtttctgcaccaggggcttgtgatgtaggttgccccgagaccaccgttttggaagatcagctttataatctttgtttcttctgttggagggattggaaaacaggtttcagaaggaagttctttgctaggagattgatactgtatgctgggttcagaggctaccaaattggcagtatgccacctccagacaaccaggagacagactcactcttcactttctctcattctttttctgcgatgcccagatttggctcttgcttttactaaaatagttagttcttcccaagtcgattgcagtgtcctggagtttgttatattaaggagtttattgcctttcacacatgtgagggtcttgggacacagggctgttttgtgaagttctatgtttgtcttggagtttgttgagccctggcatgtagatcacagtagcctgggttcagctgactcagggctccagtctttagcagcggtaacagcagccaaagccagactttatagcaggaggtcattactatctctatcctggacccttcctctttcttcacgagtgtgggcagggaggaaagagcccttgaggaaactagacagtttgtggactttgcctcttgagatagcggtggtgagggtgctgagcggatggtttctttcacttagcagataccaggccttacattggttacatcgtcctattcagtctgttgtgcagagaataaagccgagtaagaccacacaggtttagttcccagatactgcccttattcagaaattctggttttaatttgctgatgcaggtggtgtgtgtgtgtgtgtgtgtgtgtgtgtgtgtttctttggcttggtcagcagtcagccaagatctgtgtccttgggttattggctcatggttgcagttccttggaaggagtttattgtagcaggtaaaattacatgagacctaccaaagcttgtgtgtactggagtcctatttcggacactggcccttggggcattgtataaatgaaggttccctgctaaggttcccctctccattctaccaatctgggtaagaattggagcagtattaaggcatggatggggagtgggaggtggcgcttgtcagctgcagtttggaccagcttgttgcaacattgcgcttaccaggttcctgagaaaggcattttgctggctttaggtcgggctgagatgcgcataagcttgcactctcaggaggcagctctctactaaggagtcagtcctaccaagggaagtccagctgttcacactgcctttcttctgggcctgtttggataagggtgtgccaggtatttgaagacccttgcctcgtgcagctatttacactgattgcagtaggaactgtatgccttatttcttttcccgcctgcctgtgatattgtttccagcatgctgagaaaagttgattttatgttgaatgaattcaggtatttgttaccaagttagtccagataagggtttggccttcttttgaacttgctgtttctgtgtagtttctttgtagttcaacattcttgtaattgtgagtggcccagggcacctagtggtttatgctttcaaaagcagttcagaatatttattgaatttcatttctgccttgaggatagctagtgcttacagcctgggaaaggctttttcagcctgtgtgcttccacagatgggagcaccactacagaaagtggtttagaagcgttcaccttggggttttggtatgaggcacattccagggtttttatttatttattgaaaatttttaattttttttttattgtagacacaggggtctcactatgttgcccaggctggtcttgaacttctgtcctcaagtgatcttcccaccttggcctcccaaactgctgggattacaggcatgaaccatcacgcctgaccatgttccagatttgtaacttggtcattttgagttcctcttcactctgactaggaaaagacctggttatttgacctgagggcacagaattttgcttgagtttagggaaggctatttcctcttcagagaaagatacctgctaaagtcgcaggtcctcgagaaacttgctttacgtctctgagccttgttttccttttcaaaaaatctctcatgctttagaaatttctgataagactgtaaactctcctgtccagagtagcttgaagtgtctctgtcactttttttttccttgatgaccttttacatggaattaaaaatagggcagaacatagctccagaggggaaaaaagttggttggggaccagagcctatcaggttgctaatgctgtaaccttaaggaataccctttcctgggctgccttcctttcacctggggaaggatttggctttggggaggtaagagcttgaaacatgggatgagagaggagtcactgctacctctgatttgctcaaagccatggcagttgtttagaattctctacctctactgtcacctaacaggcaggcttcatctgcaggccttccaaatagtggaagttcacaggtagaaaatttaggtccctgaatccgtgggttcgctgtctcagcccattcagaacaattctttaggtactggcctcactggagaaagaagtgatccagaagaacagtctagtgaccaggagatctgagggtagggtgggagtgacgctagagcaccaaggggggctttacagctgtgttctcatggaggacaggcttctgctcattctggctttcccactcttgtggttcccagttgcagttttccagttagttttattacttccttttcttttgatccattccctaaactgccttgagtggaggcatttgtttagtgcttatcgtgtgcatatccttgcctggctagcatacccatgtttctgtgtctctctccgtgtgaggcattgtattgagctatttatacagattgttttatccttaccacaatgctgtgggataggtggtgtccccattttataggtgagaaaacagacctagagaaaacaacttgttcagtgacacttcgtgtatgtcttttcctgaaccctgtgctgaattttccaaggagcctagttactacattgtctaaaactaagaaagagcagacataatgtaggcccttcggcccccttcctttttggttaactgagttatgccaatttcagcagtatgctgactgtacacttcattgtattttagagaaatctgtttcgctgtgaatgcataaaggctaaggagggaggaacaacccttgtttgctgctgcatctcttgggacttgggcaaattcaactttgcacgtggcagatctcttgggaaagccacttgggttttaaagggaaatattttaaaggtaattccaaggttgttaagtaatttttgttcacatggttgagttttcttcactgtgggactgagactgccgcagattacgttactgtcagttcctcactttttccacttggcaagaaaaaaaaaaagattcggcctggtgtggtggctcacgcctataatcctagcactttgggaggccgatgcgggcagatcacctgaggttggagttggagaccagcttggctaacatagtgaaagcccgtttctactaaaaatacaaaaaattagccgggcgtggtgatgcgtgcctgtaatcccagctacttgggaggctgaggcaggagaatcgcttgaccctgggaggtggaggttgcagtgagctgagattgcgccattgcactccagcttgggcaacaagagcgaaactccgtctccaaaaaacaaaaacaaaaacaaaaaaacaattccccacccatgcacaaaattttctgtgtatccgtaaatcaaatgtagtcgatgttccagatttgtaatgatcacagtcctcatggaagaaggaaattcttagagctcagttggaagagaaacagcagtctttcagtcttcataggtttgtatcccggggcaatggttttttgaggctggaaaggagggggagcatgttagcagtacatcctttgtatgcattgctcagctactctttgatttcttgaggagaaatagaaagaaaaaagtctgaagacaaaagtgcaatgagtttcctcttccattgtctcatcagtccctctgatctcgtggctaatgtcacttacaggaactgttaacagttatgtttatttttttgaggtcttgacctcaaccactgggtctttttgttaatcttttaccttttgccatgtcttctcccttgttgatgattcagaagataaagctctggggatgacagcccctggccttctcccaaaggatctagttgccagatgtcttcagggtcaccacgtgagattggaaggcagtcttgaaatcttaatttcatgcgggaggagagactacatgacggctacatctgtagttggaacagtatatttatggagcactggaaagccttactgtgtttataggataaaggagtcaggctactctctggaggaagcagaactatttacctctgagactgaaatgtgatatcttatatttgcacaaaaaagattcggcctggcgcggtggctcacgcctgtaatcctagcactttgggaggccgatgcgggtggatcacctgcggtcaggagtttagtgtgttgtgcgagaggaagaaaaaaacatatatacaactgtcttacaccaaggttgggagagggccagggccaagagaggttttctgctcttctgatactgacccgaggtaagtaactttttacttttatcctctctcattccttgtcagtttgtgaaatgtgaaaggtgattcccctaggacttggacatcttaggcagattgccttgccctgcaggatgctccagccttgtggacagagtggcatggcttcactgctttgcaggcacctccttcattgtcatttattcattcagcaaactgtatgagtggcgactatgtgccaggtcccgtgctaggcactggaggtgcagtggtgactttttttttctgctgttggtttatctgagtgaatgttcaagtaagtaggtgaggtggagttttgtgagtctgtgggaaggaaggaaattagcatcacacctttcttttatgagcctgtttttgtttacagctttggaactttttgaatgaaaattataaaaaaaacacacaacaactaaagctggaattttattcgtaaggacaatgaagaatgactttccaaagcagatatcctgtttgttttagactctgggcttttctgaatgagagaaaacattctttgaacttcatcttgtatggagttcctggccatcccccttgttttaggaggtttctctgaagccctccctcttggggaaccaggcagctgcaacacagcactttcttctggtaatgagttagacttgttctccgtacagtcagggggaaaaagtcattttaatgtgcttttagaaagttccgctctgaggtttacaggggctgttggcctgattagtgtttagtttctttcattttactcttccatagtaatggctgtatgattcctgcctttgttggagctctgtttggagccaggtgcagagtgggtggccccttttatggagagggttattagcattgccctggaaatgcctctggctgttctggggtctttgcttttcttttgtgtcttgcctctgatgtgctttctctttgtcttttgtcctcagcctcagactatggcatgaaactgccaatcctgcgttccaaccctgaggaccagatcctgtatcaaactgagcggtacaatgaggagacctttggctacgaagtgcccatcaaagaggagggggactacgtgctggtcttgaaatttgcagaggtctactttgcacagtcccagcaaaaggtgaggcctagtcaggctgctgcttgaccagtaggacattgctgctcttggacaatccacgattatggggctagagagtgtgagagtctctccagaaaggcagaacagatgagctctagagaagcatgttccatagtgcacaaggctgcacttgccttgggggtgagtgacagaaagcaatgccagaatccttggtttgccaactaactgatcctgttaaggccctcctggctacttccctccatggtttgccgcaccttcttgtttttagccttatttttcctctgtcccttcctgtgaatttccttcttcctatgctaagctttttgtttgtattctttgttccttaaagccaatataagaactcctgggcagtgaaggaacacggctttgatttgacccgggttaaggatgctaaccaccctggatatccagacccatcatttcttaaattatttttgaacttcaagcccaaacacgtgcatgatgtccaactgcttgaaaggatgtaaagctgatggttttgacattgttttcttttcttatcctggaaggtatttgatgtacgattgaatggccacgtcgtggtgaaggacttggatatctttgatcgtgttgggcatagcacagctcacgatgaaattatacctatgagcatcagaaaggggaagctgagtgtccagggggaggtgtccaccttcacagggaaactctacattgagtttgtcaaggtaattcccctattctgcccattgctgaagagagtgggtacaggggaagttgtttgctgctgtgtggggttgaccactgtttcccttttcctaggggtactatgacaatcccaaggtctgtgcactctacatcatggctgggacagtggatggtaggttgtgttctgacctgcttttttgacttgagtggagggatatggttgaggaagcccttgggaggtaattgagctgatcactattttggaaacacttaaagctaaattgtaggggattcagaatcagttggataaggatgaagcataacatggtactagccacaagctttggagtcaggtctatgtatatcttgttgctgccatttaatcagatgtttgtcttggatggatgcttttaatttccctataaattgggattaataatggtacctattggtgtaccctgacctttgtagtcatttgggatcacctaaaacttgtccttattctgtttgtttgacatctctttcctaggggaaaaaaaggtaaaaggaggagtcctgtaggcttttggtatgctctgaaagattccagcattgctggactgcactgggacaaaacttcacttatttatgtctccttatccttgggatcaagtcttagagtatatttctttctcagggtttagattctcctggctgccagcatctcaggctgatttttgcagagaaagctgcgtctttgtgacatttctcccccattccacctctgtacctttccccaactcaatcttgaatgcactgaggatttcatcctgttgtcttgatgtcccccaaatgctgatattatgacatctaggaggatgaatgtcttaccaccaaacagacctgtgttcaagtccctgaggaggaggcaggacagagggatagtgtgtgctgggaacccagaactctctgggtcaacgtttcttcagttgttgtgtgaatcaaaagggaatgtgggcttgtgggaggaggagggatttgaaaaggctaaagtttaggcattggatcattgtccctgtccagtctggttatcttggggctctgtaaaagtagaacaggaaggtaagatagtgaacctccctatgagcacggctttttctactttctagttaaatctaaagcttttgcagcactctgctgttctgtagaccagaggctatttctgctacttctggtcttttctctggacccgggttcaatcacagcaatctctttattgtggcttatttgctgcttttaagggtctctcttacttaaatgctgtgggtcttaacagtgttttcttccttgtgttagatgtaccaaagcttcagcctcatccgggattggagaagaaagaagaggaagaagaagaagaagaatatgatgaagggtctaatctcaaaaaacagaccaataagaaccgggtgcagtcaggcccccgcacacccaacccctatgcctcggacaacagcagcctcatgtttcccatcctggtggccttcggagtcttcattccaaccctcttctgcctctgccggttgtgagaacaaatgactatcctgaacagggtggaggggtgtgggaaagaaaccagccatattggttttggtttctgtatttttcacaatgattaatgaacaaaaacaaagagaaaaaaacacacatcaattaaaggagacaaaaagaggcagagcgagtagagagcagccctcattcaccacctggtcccagacgtgcttcagtcctcgtcctctctttgtggctggctcccagccttctctttcctcttgaggatacttagggtaaactggatccttcctgctcaaggatcctcatttgtatacctagtggaaaggactctgaactcagaggagtcactgttcctttttttaggttagaaattaacagcagggaaatgccatcttattacctgagacgaccagcactgggagttaggtacggtctgaagttatgtctagataagacttcagacgtcctgggattgaaagaatgtgtgtgaaggggtagaatttgtgcggtaaagacttaaaaaaaaaagtagggagattaaaaaaaaagaaagaaaatgcttccttatctggaagcctttctggattaatccagtgatggtcccacctttagtgtttgagctttgtcattgcttgtctccctggcatgtgccagttatagactgtccagcatccaagacgtttcggttatgtcgggtcctcagatcgcctctgacttgttaccacaacaaatcattttgatttcagtgcctgttggggacttgatttcttctcagttttgtttgtttgtttgtttccttaatctggctcatttgaaatttcttctccctctcaaccatcccactaagttatagccaagaagggaaggagacacggggatttggggttctctgcttgaatgtcttctcctttaccacctcaccttgttggtacctccctccctggatctctgagccagcagccaggaggacctgacccagcagttctttactggcccctttgtagggccttgctgccagggggcagggatgctttccagcctgcagcaacagaacacttgaccttaaaagtctcttctggtctttggattagaaaaggcttatgttagcatagcttaagagcaacctcagagatttgagccctactaagtgactgaccactgtttagagtgtctggtatctgatgttcatttattcccatgttcttgtgtgtcacagttcagccagttttggtttatgcctagagctacttcaaggaactagactaattagctatataggcccagcgatgcttcttattgatcttaatagtatgcccctccttcccctgtcctttcatttctctatccaagtagcagtcaggttcttggtgtgatgggactgaaagaattccagtcagccagagccttggcagctctgaagctaaccttagcatctaagtgtcgatcttgaattccctgaaaaaatttctataggaaatgaagcttccctggtcccctcctttctggccattgtcatccatttcccagttagggcaacaatgaaggaggacccagccaagctagaaggaattttgtggatgggagacagcaggattagcttcagcttgggctggagcagtcaatataggatctcaggccaggcccgcttttctagaatgtgtttaattttgagtttgctttattagatatgttttttaagagctctgtatatttgaactgctccttatgtgacaaaataggtagctcttgggctcatgtcctgggttttggctctttaatgattactccaggccagcatttagtcgtttgagaattgtagcctgttgttttcgctgtgacttgggtctcagtgctagggtattgagtcaggcagctggagggttgtggcccgaggctgcagtcagaggtatacttcccatagtgcttcacacagctcccctgcttctaaaggataaggtactgtagccttggtcctggggaccacctgcctggggcagtggacatcctaactaaacaggcttctggcagtagctttggttcctatcccatcgaaattccccaaagccctgggccactgccattgggttagtcaagatgaaggaggaggactggctgcctccattttgccttgtttgttagtttgcctgggtctgtctgaggaaggagggggtcccgccttccacctcaacacatcccttcagtgactcagagtctcagaaggaaaccctgactcctggggccatttcctaatggtactgtaagccaagcagctttgcttctgcctctgtttccaagcccacccttttcccctgagctcagggttagggatgggcgctttcctctctggttgtgaacgaaaggaaggaacatctttctatggctaacaaaaactaaaggggaagtgaggaaacaggaagaagtatggtgggggctggggtagactcccctggagccaagcctatccagctaacaagagctccctggggctggtcacagctggctcatgatgctgaacttgaaagtttttttgtttttgtttttgttttgtggctcctccaagatataggtacatgaagtttaggttaaaggggtgggattctttatttttatttttgtattgtatgtgtcaagaattactctgttgttcaccttttgctttttgcactgtttgttctcttatctgtattttgagcttagtgctaggactgagaggctgcaccatagggaatgtatgggagatggtgaggggtgccagtgaggggtgcgtggaggagaggcctgggctcctctactggatctacactctgtcccaggtttttagatcccactgagcccagctgactgaaaacaaggacagtcagggtgaaacttcttttgccagaagtgtggcctgagttgaatttctgggaggatgacgcagatgtctgctgcagagctgggctgagagttctgcagtctagctctgacttaggtcaggggcctgttggtctctcattggacgtttttgggtctcactcatgcttactgaaacattgtgccaagaaactctgtgggatttgtgtcccttaaaccagactcacttttctgaaaaatctccattgttgaggagaggctgctcaatcgacaccccgagttctcatgactgggaagatagttttcttcaggtgtcaatggcgttagactcccaggaagactagccctgcccacagggccacctgttggtttgagagcgtgttcgtgttctcttgccctccctgcctaagagctactgggatcacgttagcgggcatttaggctttgatgagagggcacagtttgagttaggtttacctccccctttctgtgcctgggaactgtttggtccagctttagaactgtggttttgacttccttatctcttgggagaagcttctgttttaaggaatttctcttccttcttctcctgcctctagcctctcctggaaaggcctggatatggtttctaaaatctcagctgagaacttcagaaaacagcagcagtattttccttttcctagtgctaaaatccctttccctagaaattggctcaccttgggaaacccagggaaagaatcagcaggttctctgccctccctaggggttggggaaggacccaccccggtcagcacagtgccttttcctctcctgctctgagccagggtggggcattccctctagattcaggtttgggcaggggtcctatagtccctgccatggggctgcttccctgtcccttccctcccctttgctggcctactctggcataattcaagtgtcttcttgccttggggatccttagtggcatcaaatggcaacatggaatattgtcctccatgcccctccagaaggacctaggagagtaggtgagctttccaaagtgagagacgaatctttctttctttttttttttaaagggcaggatgggtatgctttgggctttctccttctgtggccccggaggaaggagagactgaggcaaggcaaagtgatagtacactgaagcagaaccggaaacacccaggaactgttcagaaatctcagaagaaatctgcttctcttcgatggaaagatataattaacgatcaaagagctctaagaaaattgcaaagaagccttaatgttcaagctttagaaagatcagagcaatttttctctttcagtccaaactaagactctctgtatttaaatctctctggggcaagagggctagatttcctcattttgttatgagactagattggtaccagtagatcagctgcctagcgagggcaggtttcttctttgcatctgtgtggcttgcttccagtctggcctgtcctttccagctgccttttgtctagcctgctatggggggccagattatcttgataagagcaggtgatttggggactagctgggttggcaggaaaagagcaggatggatctcttgggacaggttcccccaggagtataaacacaaggagccaggattgtgctggcagccaaggaaacagtagtgcctgtttgagttggcagagagggccttggcacctcttgcatccaggcagtcttgtgagatgggggcacatagcactggggaaagcagaactccattctcacctctattttgagcttcagtgctttatttcagtatgaggaaaaacaacaacaaactgaagtgcgctttccgtcctttcaaaggacaactgtcgggaagggagagccgagttgcgaggtaggaggggagcactggcagggagagacattcttgactcctctcttccctggtgtgttgtgatccagggaatgaaaagaaatttgaccctggattggttctctccttggacttaaggaatcttaccttttccttccacaaagttctcccaggcaaggaccagctgcccattctgagcccagggcagcctcttcaaccattattggtctaacctggcttgtcaggaaaccaagcccacccttccacattgggcctggctgctctattctgtaccaagtactggagaaaaagcatcaagttcttagcccttgtagcttctaccctagtttcccatcctctctctgtggaggccaaaccaactctttgccagcagccacaacatgcattgacagcggcacagtgagatataactgatgggctttgaacctggttggccggggaagctgtaggggtggatagagctggctttccttctgggctgtctccatctgaccctaccccttccatgtcccaccccactcccaccaaaaagtacaaaatcaggatgtttttcactgtccattgctttgtgttttaataaacaatttgcagtgacactctg

SEQ ID NO: 13019 - DNA, 477 bp, Homo sapiens
tacaccaaggttgggagagggccagggccaagagaggttttctgctcttctgatactgacccgaggtaagtaactttttacttttatcctctctcattccttgtcagtttgtgaaatgtgaaaggtgattcccctaggacttggacatcttaggcagattgccttgccctgcaggatgctccagccttgtggacagagtggcatggcttcactgctttgcaggcacctccttcattgtcatttattcattcagcaaactgtatgagtggcgactatgtgccaggtcccgtgctaggcactggaggtgcagtggtgactttttttttctgctgttggtttatctgagtgaatgttcaagtaagtaggtgaggtggagttttgtgagtctgtgggaaggaaggaaattagcatcacacctttcttttatgagcctgtttttgtttacagctttggaactttttgaatgaaaattataaa

SEQ ID NO: 13020 - DNA, 517 bp, Homo sapiens
atttgaagagggcttgccttccaacctataggcactatatatgcttttggaaaaagtaattaggttaagatgcagttgttttgttttgctttgtttttcccttagctgggttggggtttctagcagcaatgatgtacaggtggatcttttttcacattaacactaccagctgctccatggctatagtgcttaggaatatctcagaatttcaacagatctatcagctgcaatatctaggagtcttgccaacacagagacacattcacatgctgaaaagagcatgagttgaaggcacagctggggacttttgatgcaggtccagaactggatggttgtgaagccattagagatatttaaattgtccagaatttcaggctctgctttaaaaactaggctacaaaccctcattcagaaagaggtcagtaatatgcctgtgagttagaaagatactggaaacatttcaatgccaaaagtaacatttttttccagaatgctatgactaaattttttaaaaaaa

SEQ ID NO: 13021 - DNA, 18501 bp, Homo sapiens
  SITE (9479): n equals a,t,g, or c
  SITE (9480): n equals a,t,g, or c
cccctgccttttttttttttttttttgagacggagtcttgctccgtcgcccaggttggaatgcagtggcgcgatctcggctcactgcaagctcgactcccgggttcaccccattctcctgcctcagcatcctgagtagctggagctacaggtgcccgcaaccacgcccggctaatttttttgtatttttagtagagacagggtttcaccgtgttagccaggatggtctcgatttcctgacctcgtgatccgcccacatcggcctcccaaagtgctgggattacaggcgtgagccaccgcgccctgccagcccctgctcttttcaaagcctgcttctgcagctgcttcatcaatgctatttactcccaattatctttccaatcaattcccttttgctcaaattggagtcagtttctgttgctttcaacccaaagaacagttaactgatccagctttcatcatctggcccatttccagtcttagttccctccagcatatgccataaccatagctcagtggttctcaaacctgagagtgcaaaacaatcacctagaggtcctgttaaaacaaatttctgggctccattagcagcagttcagttcccaagtgatgctacctctctggtctaggaaccactgctctagagttctctttacatctccccagcgtatacccctatttgggtagggtattcaactgtcccattttgcccaggacttaaaggtttccagggaagtaggactttcagtgctgaaaccaagccagtctagggcaaactggactgtaggaattgtagctgcaaagagccattctcttcaccacccacaggaaatagaaatgaaatgtaaacactttcattccactctcctttgtccccattaaggaaggacttggtaggcacactcagcagatgaaacattaaaaggctgcctctccttggcatagaaatcactttctgatacagagaatggacttaagcaggtatccacagagactactttatttatttacaatgccatagtttagaaaacaatcactcctgtacgtggttcttaccttaaggtcaccggaggagaacatgctgatgtaattgttgaccatcttaaacacataccctcggtccataaatgtaaagcagcgctaaaatagataaaattctaaatttaaacacttttacttgaagaatcattaaagattttagaaaatatgattaaatatattgaagtaaaataacactaaactaaatgtgttgtataattaggtatttaaaaaatcttctaaagatgtttaagcagtcatccacatatggcaactaaaataactacaatttatattaaaaatgaaaatgaaacagggcaatatactaacagagaataggtacatttaaaaattcagaagaaaacaagaaaaattgaaaggaaaaacagaatgaaagcataaatgaataaaacaaaaatatcaatcagaaagttataaatctatattgattttataaaatgtcactggagctttgcaatgaaatattatagccccttcttttttatacagaaagctttagctttcggttgtctacttttttaaccacttagttacattttattattttcttttaataattccatttcacacttatggggttgtaaatcttctcctgtacacactgggtcataatgaggagtggtagagacgagtcaggaaagccttttaaatctcactggccccttttgacagagtagctcctctccttatcagctgaggaagcttgcatttgaaggctgaaggaaggagatcgtaagatttctatcagcgagctgcttactacctttcttattctgtggtcaaattctctttactgtatcaaggagagtcttaaacagtaagtaggcttggaggagcacttgctctctctccaaaagacggatggtcatgtaaccagtaaccaagctaccacggccaaagactgcacaggcaaagtgtggagcaggaggaagggaccatagttcccaacgcaggatctggggaggcactagagcaggtgcctcccatagtggatctgcagctcattacttggtgtgtgagtctcattctattcacccacgtgggtgtgagtaaacatgctgcttgggaaaattccacagctggtgtggagtgcttctttcttgtcgaaagtgtccaggatgatccattaaaatggttttgcatttcttggagtctctcctcaattttactcacagacaggactacacataaaatcttgctatggagagtggaccaagagctctatggaaaacattcatttattccaaaagcacaagctatttaagccaagtagagtagatatgaagggttttcactttttagagacttgcttatccatccttatctgatatttagagagaaataccacagatgtttaaaccaagtctctctctaatattaggtgatttccaaatggttttcaacagctcattgaaacaaagcagtggttagtcaggcgaatgggctaaaagatacggctatccaatcagcaaaataaaaatcagaatgaatcagcctttgctaccatcttggtattgtgcttcataaaaagagtgtctaaataggtatgttcagataagtagagctgtgacccaggtgggtggcaaaaagaaaaatgacaaaagctgcaatcatttgaatcctatttacttcactgagagaatagttgagaaatgtacaagctttttggcataattgctgaaaaaatattactttcccataatgtggggtaagggaggctaccttttaatgtagaacatttttatatgcccacacactggttcccagaggttcttcttgattcttggagaccaattttgagcaacccatggagttacaataatattttaattgttaaattccaatgttgactaattcacagtatttgctaatgtagacttcaataacaaaaagaggtagcagtcatttgaagccccaattgagcaaataactattgtttgctggaaatataagagatttatgacatcagcactaggagtgggctgtgttgagcatctgaaaactcaaatttattggaattgcaccaaatgactacgttcagttttacattttcaaaaatcactttcttttcctttcttttttttctctcctagctcaaatgattcatctaataagtgttccaattttttttaatattatgtgtcaaataaatgccattaaaacttcaaattagtaataaggagggtaactatgaggtcttttcccttttttagagacttgcttattcgtcattttttgcagtttagggaagaatatttcagatgtttctttcaatatattttatttgcaaactgaactatacataattctttctaagtttcctagtaaactattagcatagcaataaactttattcccataggtcttaaaatgtggtagaaaactacagtaacttttcccccctttaaacttttcccctttaacacttatcattcttgtctctttctggaagcaagaaaaaagtaaaaatcagagacaaaaccttgaagaaaaaaataaattcaggataagaacacatacagtgtataatttgaaatagtttttaacacattaaaaaaaagaaattaggctggattaaagctcaccagtgacaagttgggcccattttccacttctataggcttttaactgtatattattagcatttatttatacattctcacactcacccatatgttctggtgactaccattaagaaacaagtcaaatgacttcataaaggttatagtagtcaagagttagactaaagaaggaggcacagaaaactattatctttctaattgcttgcattatctgttaaatggtatactgtaattatgtatcttagttttttcttcgactttgcatttctttcctctcagctcaatataaatggttgtaacccaatgaaatataactaatttccatacatatccagtttagtaagtagctactcaatactttacttgataatttttctttcatgggatcagtgtgatctttccataatgtaaaaaacagcgtgggtcaaccttggtggctcacacctgtcatcccagcacttagggaggccaatctcttgagctcaggagtttgaaaccagcctgggctacgtggcaaaaccccgtctctacaaaaaatacaaaaattagccaggtttgtgtctgtgtcctactcaggaggctgaggtgggaggatcgcctgagcccagggaggttgaggctacagtgagttgtgatcatgccagtgtgctccagcttgggttgacagagtgagatcctgtctcaaaaagaaataaagaaaaaaaagagcctggagataataaacaaaaatgctaaattcctgaagcgtttcccaaagtggctatttggtatcactgtcagagctaaagccattataacatcactttcaaaggcagaaatgtccaagagaataatattactgtagtgcagcttcctttttaaaaatttcattttttctcttaaaatatatttagaaatactatgatttgactgcactcaaatggatacttttctctaaccttagttttttttttctttcttcctgtcttttttttttttgagacagtctctctctgtcaccaggctagagtgcagtggtgtgatctcggctcactgcaacctccgcctcccaggttcaagtgattctcctgcctcagcctcccaaatagctaggactacaggcacgcaccaccacgcccagctaatttttgtatttttagtagacacggggtttcaccatgttggccaggatggtctctatctcttgacctcatgatctgcccgccttggcctcccaaagtgctgggattacaagcataagccatcgcgcccggccttctaaccttagtctttattcaataagacttcaaattgaaaaaaaaaattaaaaagtatttcaagcaataaagatgtataaatgaaagttttcatctgacagtgctagttttgatttttcatcatacatgaagatgtgaactgatgaaagtttagactatcttgcatccaccaacatggggccttgaatagaactgcgatctcatataactgtaccttgagaaatctggcaacgctgtggtttgcccttcttgtttcttcaagtgcatccttgtatttccaaatcacatggtcggataggaccatgacaagattgtccaattcattttggtaagattcaggaaatctctgaggccggggaagctaaggaaagaacggattatatctttctaatgtggcatgtgaaatattaagccgaggaagtatcaactgaaatatttactttattttataggtcattaaagaaaaagaatccttttgaaaacttgaaagcagtaataaaatagaagccttttactttcaaggtcatgatttccatcattaatatttagtgtttccttcaattttggtcaataaaattttcactttataataaaagtcaatcataacaaatattaattgcaaactattgaaacaatgtagcaatgtacaaagtaaaatgtgaaccttctctgtggcctctcatatcttactttccctccttccctctcagggaatagctactattaatggttaatgaacattattctagatattttggacatgtagttctctatttcatttaaaaataaattattttgatttttttacaactaggaatgcccccaataaactagtctaagaaattaataaatgaataactgaatgaatacagatattggtttgaaatgtcctctgacatttggtgagtcccagctagttttaactccctggtcccagtatatgccacagttaagagacaccagtgggacctcacaagtcaagataaagaagggcttggctgtgagatgacattacatccactgaataaagctctatggatctcaaaagaccatttcaggtccagatatccatccctcctgtttggactcctgcatatgaggggaacatttgaggcagccgagttcttccatctcagactctgcttttttttttttttttttttttttggagacagggtctttctgtgtcacccagattggagtgcaatggtgtgatctcagctcactgcaacctctacctcctcagtttaagtaattgtcccacctcagcctcccaagtggctaggactacaggcgccctcctgtagtccatacccagctaatttttagtagtgacagggtttcgtcatgttggccaggttggtcttgaactcctgacctcaagtgatctgcttgccttggcctcccaaactgctaggattacaagtgtgagcccccgtgcccagccttacttctgataagattcattcatctttaccagctggctttaaaaattagacccagacacattttcactatagatagaatcatggaatttagagttacactgaactgtgtatttctaaattgtgagcacccagacttccatgctgcaaggataaaaatcatgaaggctgaagttacaggagttgtatgaaacagatatttaatggaatttaacgggatgttggagctggtttaggctggcttctatttttttttttttttttttgagatggagtttcgctctgttgtccaggctggagtgcagtggtacgatctcagatcactgcaacctccgcctcctgggttcaagcaattctctgcttcagcctcctgagtagctgggattacaggcacctgccaccacacctggctaatttttgtattttttagtagagatggggtttcaccatcttggccaggctggtcttaaactcctgacctcatgatccaccagcctcagcttcccaaagtgctgggattacaggcttgagccaccccgcctggccagactggcttctatttttaagccactttaccaggacatcactgcatggatatttttgaaaatttcatggttactctctatatatttaaaatttattgttgaaatcaaataaattaacaactaatgaacttaactgatttgatcacacacagcatttttaaattctcttccataaaacttgggtaataaaggtaaacaattcacctacaaaaagcaacagtcaccttttaaagaatcaaagcacacttttaattttcaattttcgttttgttagtcctctaaaattccttaagcatatcatacgtacattttccccacatgcatatgcatgaatgccttgggctttaatattccatttgttccttcctctttacaccttcctctcaaagtctcctgtggcctactctcactctgaacccaaagatgtctgcctaataaatatatgagtacttttaaaactgttttcccgaagtatatcctaaagactcgaggtggaagaattcctgcactggagattgtgaattttttgtctcaggagatgaagggagtgagatggtggcacacttcccaagctgcagagctggaccatgatgaatctgagctacagcatggcgaggtcaaggggaacaggcctgggatgcatgggcagaactgtaggcttttgggagttttgttagaaacaaggaggatgatgggaaacaaaaggtttagctggttcaatgatccttttgctactagagaataatgttgagaaaacattcagtggttcccaggaaattgttttagtttgtttgtgttttgttttgtttgagacagagtctctgtggcccaggctggagtgcagtggtgcaatctcagctcactgcaaactccacctcccgggtttaagcaattctcgtgcctcagcctcctgagtagctgggattacaggtgtgtgccaccacatccagctaacttttgtatttttaatagagatggggttttgccattttggccaggctagtcttgaactcctgacctcaggtgatctgcccacctcagcctcccaaagtgctgggattacaggcatgagcaactacacccagccattcccaggaaactggaactcacgctggccaagtgcccaacaacattgcaccttttagaggactaaaccagatatctcccctgacttcctcagatcttccacacttactccttggatgatggaaattcctttaatagtggagaaaaccattcacttcacaatttaaaaagaaaaaaaaaagaaaatacaaatagcttgggaaaagtttactgtgaatgctttggtgtcaaatgataatatcagggctgggtacaatggctcacgcctgtaatcccagtactttgggaggctgagatgggcagatcacttgagcccaagagttcgagaccagcctgggcaacatgacgaaaccccatctttactaaatatatataattatctatctatctatctatctatctatctatctatctatctatctatctatcatctatcaatcatctatatgaaattagctgggcttggtggccatgcctgtagtcccagctactagggatgctgaggtgagagaatcacctaagttggggaagttgaggctgcagtgagctatgattgtgccactgcactccagcctgggcaacaggagtgagaccgtgtatcaaggggaaaaaaaaatgggccatgcgtggtggctcatgcctgtaattccagcactttgggaggctgaggtgggtggatcacctaaggtcaggagttggagaccagtctggccaacatggtgaaaccccgtctctactaaaaatgcaaaaattagctgggtgtggtggcatgcacctgtaatccaagctgcttgggaggctgaggcaggagaaccacttcaacccaggaggtggagcttgcagtgagccgagatcgtgccactgcactccagtgtgggcgacagagcgaaactccgtctcaaaaaaaaaaaaaaaaagtaaagaaaaaagatgatatcaggtcttttcccactgtgatgattagagatggttagagtggaaggtgcagggctcctgaaagaaaactagggtgtgagggttaccactgaaaggggtcacggaaagcaaacctcaatcggagaagataaactgctggacacaatcatgctggctattatcagttcatttattcttaggctgctcacaggtgtgttttgtgacctgtctatacaagcagatgcatactggtaggaactagaagagaattttagtccaatccactcttcttacagatgagaaaacaggcactgagatgttaagcgtcgttttcgtcagctaacaagttagtgacagagcaggaattgcaacagtgaggtttcctgaccccagtagagcttaacaacagagagatacgaaccatttttacctttgtgttagattttctctccctcccaggtaggaggctctcatctccagaagtggagagcagaaatagcagaaaagcaaaaataggatttgcgagttaagagttatggaactccacagatgattaaaggtccagcaagccatttctgtcatactagatcanngccatggttacatagacctggggcctagaagcatggatgaggacctctggatggatgactctgaggaagtggctctgcacacttccctgaagccttagtgctagcagaagtttaattcctccctattaagtgtcagcactcctcccatgcaagatgatattgcaaaggcctctccctgctagaaatcaggcaaacccttgaggagttgtcccgcctctccttctggtgatcagggcaatacctggaggttaaatcctagcttaacccagctgggggcttgctgggcctaataaagcaggaaagagaatatacccaaagaggctataaaaattagctatcatgtaccaccaggaggtagggcagaacctctgcaattgtacattgaggatgtgggccagaaagtaagggcaggtaacttagaatgcattgacatgggtgtgctttttcagaacatgggattaaataaggactcacgggatgagcaactcactgctagggttgctctgagaatctagagatggcctactttaagcaaagtcgaaatgtctggttgtcctggcagaggatagaggaaaaaataaagaggtggagggaggtggatatacaggaatggacattaattgagactggaagatccaccagtgtatcaagttccccaggcaggcccagaagacagcatgcaccatggccactaagaaggtgctggggaccaatatcattaagaaggtcaggggtgtttcccatctgttggcaggaggagcagtcacagtcttggctcatgagcagccatggggatcagggatcaccaaaacaacagaggccatgtgctgtgcttaatctccaggagccagggggctgtgagtatcatgacaaatgacaagactggtggggaagccaagagggaccgactctcagggagttgtagagctggttaatgatgactggaactcctagggacaaaacagagagcaaccaacaatggtggtacatcatattaacaaagaaggcaagaatgggcaactggaagatggggatgttcattccaatgaatagtcatggttcctttgtctgttcctggacctgagtcacaattcagatctggtacacattgactgaagaggtgatggggtccctaaaggaaagcccccactgcaacaatgcagtagatacatactgtaatgagtctatcaattcttctccaaagggccctatagccatttactcaggctactgtacactgagaagaagggcatatagttcaaggactgttgcacacagaatctgagttgacattgatatccagaaatgaaaagcatcaccatgtctgccctgatagagtggggacttacagggattaaaggtggagtcctgactaaagttctgttaacagtagatccactgggttcaaagatccccccaatagtcatgtaactggtcccaaatgtataatttgtattaataaaactggcatttggagtaagcttgcacgggtgcttggtctgtggaggtatcctagtgggggaggccaggtgggagcttctgacactgcttcttccccaccaaaagagtaaatcaaaataatataactgtacaccaccaaccccacctcatgcagcattgttatgatttaccctccacgtggggcaggggcaatgccagaggtcttcccttggccttacccacaatgggggctcagagaaatgtgtgtggaactcaggtgatctacctggctgcttcttggtcttcctcactccattgtaactgtgaatggccataggtaccaactctggtgtgagtagagtatgatgaccagaggctgagaccactctagaatgagggtttgggtcatatcaccaggtgagtcaccaagaccttcggagctgctagttagagtgagagggatctagaatggagagttgggatgggagatgatgagtaatacataggctcctgaaaagccatggaaggggctgtaattaattccatcagggtccctcttctaagcttcctttcaggaggggaggcccatgggaactgcagggaagcagattcatgaacttgtacaatatgtcatgcaaacttggactgtggcagccaggaatgcacatcgctcaaatgttccttcaagacagaatctagtgggaagaatataaagagttgctgtatcttgcaatatgctccagcattcatgccaaggctaccctccccccaggctgctcccagtcaacgacttagcttgcaaaggtcctggaggccgatggccttcccagtgcagggttcctctaatgacaactctttgctctcagacttcccatcagcccagctaaaaccttgtcactgtgagactcttcctagccaatcctccttccttcccccttttcatttacaggtatcagactttcccatttctttttcctgttccttttatcctttatagttatttccctccaatacatcttttgcacttccaatattgtcttggcatctgcttctgaagggcctgtgccggttggtgtacacaatcatttcttctacttataaagtaattattgtaaactgctaaggtttataaagcaaataaaaatggaactcatgacagcataatcattagtgtaattgttggataatattgtaaaaatattataatattatattacttatgttcttacctggattttatttgtgtcaatcaagtgctgtgccatcgattttaggataattgcaaagaagaaccaggaatgctgttgggaaaaaaaaggcaacgagacatttattatcctatggcaaaataatgataattttttctttgcaatatgtaatactataacattgttatgttaaaatgtattctttgaaactaaatgaattagagcagtaaaatattctctattatagtgggatgatttttatctcaatcctctcaaaaaatgtttaaactaaaacaagttacaagtttatttggcatgactgactaagcagttgttttacaaaatatttattcaagggatgttctagttgtttcacctagttaaacaaaactaaacaaacttttatttatttatttatttatttatttattttttgagacagtctcactctgttgccaggctggagtgcagtggtgcaatcacagctcactgcagtcttgaactctccggctcaggtgattctcccacctcagtctcccggacagctgcgactacagatgtggtcaccatgcccagctaactttttgtgttttttcgtagagacagggttttaccatggtgcccaggctggtcttgaactcctgggcttaggtgatcctcccgcctcagcctcccaaagtcctgggattacagttgagagccaccaagcctgacctaaacaaactttttattgtaccaagctcacccctcaaatttcaaaggttagaggtaagggtgaaaatggaaggtcatatgtctagatatctagaagttggaagtcaagctgaaaatgtgttaaataaaatatgtttgatcctcctacctcgagaaacaaaacttcataacaccttggaatgctgccccagggtgtgaggtcctggggggcacagggcctggcctgccccttttcttctcgcccaaggctccgtcctgccccttgaggggcctggtgcgcatgtgttaaatactttaaaaaacaaagcttcaaaacttatgtcacctaaataactcaatctcaaaattatctgctcatgccagattttgtcatgaaataaatgcaggcccaatgataagagcagtacacacctgttcctacttagggctttgcagaggtagggccttgtacgcctgagctcttttggaaactgtccagcctgcacatctgagtgctgtccacaacctggccctcctccctgccgcaaatagctccttaatggggtctagggttgcactcaggcatcaagacctgtcctctggaggtcctggagggcttgggacagagattgaagcaggcctggaaatccacctataggaccttgagcaagagggtcttggggttccttacaggtctagaaggggaggtaggggctcctggtgggcttgttctcttagctcctcttaaaccttggcctgtgaggacaggtgcagtatgagaagaacaaagctcatcccaggatgggcacccttctttcttgggcctaagggtgacacttatctcagctacaaaaagtcatattgtatatgtatagtttcaagaacgcaccccttgcatcctctctgcttcctactccttccaccacagataacagttttaaattttgtgctaatcattcctttgctttacttcacaattttgctacgaatacttatacaatgaagggatatttagttcatctggccactgaacttcataagaatggaactatcctctatgtattcttctgagattgcctttttcattcaacaaattctgttctgtggttcgtttatgttgaagcacgtagctggggggatcacatatggtcaccacatgacatatataatcaccatgtacttatctgctctactgtcaatgggcatttggattatatcctgttttaagtcatacaaacaatgctgcgataaacttttgacaagacagtcctaattccagaagactgactcagataaaaaagagaagggattgatattctacaaaggcagctatggcttaatgaagtggtcacttcttagtaagaagaaatggaaatggctaccaatactattctagcactccaatagcattctaatggctattagaagtgaaacatgttgttaggaatatgaatgaatcccaggcacactgctgcaatcctctttccctaatcttgtccaaaatattttgagccatcgtgtcaagtgttccaacatttgtctcttaattcaacagactcctacccctctccatcccttagcactctggcctgcctccactattttccttgaaaccaccagcactaatgaaattgagcttttgcctgttcacgtctgatgacagatgaagcctcaactcctctactgccctctccacatattcccttatatatctgcacattccactgcttccaatctcctgaaacccacccaccccaccttccagagcacatggtccatcgttagcacaatctcttgaagatgcaattcttctccgagcattcccttcactccatattttaactgagcagtgactctccccagaggatcctgcttctctgatagcccctcaagtggttgtggtctccatttttatcccactgtagtcgattctcaacacagcaatcagagggatccttttaaaccaaggtcagcttggtttaaaacattactcctctgtgcaaaaccctccaacgacacaactcccagttctgctctgagtgggaacgcctggcctatgctaactcccaagcctccagtggcttccatgacttcatcgtccatcttttttttttctttctgctcacttggctccagccacagtgtcctccctgtctcctgccacagtgtcctccctgtctcctgcagacacaccagccatgctgctgcctgatgacttcacacaggtctttccctctgagcatccccatggccagcaccctcttcgccttcaaattttttttttttttgctcaagaattacctcctccatcagatatcctgaccattctatttaaaacttcaaatctcccctgcaccttcagcactcacaatgcccaattcttacctgttctacaatttttctaatgcatcttcttttctaacatacaatatctatctatgtatctctctctctctctctctctggtcttgttgcccaggctggagtgcaatggcatgatctcggctcactgcaacctctgcctcccgggttcaagcgattcccctgcctctgcctcctgagtagctgggattacaggcatctgtcaccactcctggctaattttgtttttgtatttttagtagagatggggtttcaccatgttggccaggctggtcttgaactcctgacttcaggtgatctgcccatctcagcctcctaaaatgctgggattacagaggtgagccactgcacctggcccactctacttttttctatgttgtctcgatatagatctcttttgcttagtatctttatatgctaagtttcaatatgaaccttatgctggaaactgcaagagaaaaagtctatgaaaatccatgactcctatcattttccaggagtaagcgtgacccatgcctagtactcacagttaaaggaccatctttaaattcttacctttaggacatgctttactgttgttgagtcatttgatttcaaaagaccagtcacatttttagccagttcctcatgtacagtcctctccttgcatgccctggtcttgaacacgaactgaagaaaatccaaaaagtgaataaagttaaatactttgaaaaatgaagcttcaaaaactatgtcatgtgaataacttatgtctctaaattatctgctcatgccagattttgccatgagataaatgcaggcccaatgataagagcagtacacacctgttcctatttagggctttgcagaagtagggccttgctcacctaagctctccttgaaactctttgtagaaatcaagagaaagagccagagagccatttagcacgttcaaggaaacatggagggctttgacccacctacttaggacacattccccttctccttcctccactggtaacaggtggcatggtagcaattcttcatcctgaaagggtagagcacccactcaaatagccaagtggggaagccagtgccttccagatgccagtacgtgagctccccacaagcccagggtctatgatcccatgcttagacacactatcaaggcgttcatgaacattggccatcagtaagataacaaatgctgcatacttattttttttcctcaaaaaattggttttggcatgcaccactgagggcacataatggctagttttcagtatttcttcatctcttaagaatatcagtatcaatttatgcacatacataaagttcaaatataaaatgcttattactgaattataatatttcacttatgaattgggtttgcctcgtggaaggacatttcttcataattttcacaattcggatttcaccgtaattgagagtgaaggcaggaaagagaaggaatggcttaatgtagaggcacattagcttttggatctgtaactgtttctttaaactttgtagcacattggcacctaacttgtcatggtgggatttgacttctccaagctcatctcaaaggagaaagatgaagttaatggatgcatgaaactagataaaatcaagagtaatacaatttttccctctcatgggttatacctcagatgtgagtaacgtcatcatcaatgagctcatgccatgcacagttatttagcctgaagggcatttaaactggcactgaaatattcttattttaaaattttgactgtaacccatcagtgctacaaatcactgttaaccatggcatttaattagactggctttagacacgcatctttgaaaaagacacggtgtatgtgtgcattttgcatattgtagacgaagtgagttagcagcatttagcaccactgaacttgaaatggtgtttagataacttctaaataaatacaaattgtattgaatatcacatctttggaggacattcaagcacgcactgtaacaagagtccaatcacaggatgatagaactgaatgttcctttggtcatttcatctcatgtcacaggagaaaactgaggttcagagaggctgactgcttaagtctagaattgactagaatctagtctcttacttgccagcttagtgttctttcccgagtaaaatgcgagttgattacatttattaggaggtatttgttttagatatgttaaaatttattataaaattgttatcagcctaaaattccacataggtgtatttttggatttgaatcacttaaagcaagctaagtagataatctcctgtattataaagtgagatggtcttgttgggtatttcagataccctggttaaaaataaaggtcacgccaggatgcatttctaatgcatctctccaggagcgtcaccggtagaaagtctgagatttgaggtattcacaaagagctagccttggtaatcacaaaaatagtcacaacaccggaggggtcttaatgtaattttcaatgatcccactgacatgaggaaaataatatgtgttgaaatggagatgcctgtgtgtaagatggatcagtaactttttttctctttctcagtccctttaaggattgaaatgaaacattcgggtaatgaagcattgagagggtgaaagttctccaggtgattctgttgaatggtaaattcatcgatactctataaaactaagctatgaccctatcttagggagcaaactaaaaaggcttgtgtaggtggaactggctttttgcagttgagatgtggatcttattgggtaaaattatacaatagagaaattattgtgaaataactatttttggcatatagcctatgtttaaaaagggcacatactcatgctttggcatttgggaagacaactaacatttctggcagatagaaaacatatggatataaaaactgtaatgaaaaaaatttccttacagatggtatctcagaggggttcactccagaatgcaatttctggttacttccttttatgggagtgtggaattttttttttttttttgagatggagtcttgctctgttgcccaggctggagtgcagtggcacaatcttggctcactgcaagctctgcctcccgggttcacgccattctgcagcctcagcctcccaagtagctgggactacaggcgcccaccaccacgcctggctaattttttgtatttttagtagagacagggtttcactgtgttagccaggatggtctcaatctcctgacctcgtgatccgcccgcctcggcctcccaaagtgcttggattacaggcgtgagccaccacgc

SEQ ID NO: 13022 - DNA, 202 bp, Homo sapiens
ttctttttttttgagacggagtcttgctctttcacccaggctggagtgcagtggtgcaatctcagctcactgcaagctccgcctcctgggttcatgccattctcctgcctcagcctcccgagtagctgggactacaggcacccaccaccacgcccggctaattttttgtaatttttttttttttttttttagtagagttggg

SEQ ID NO: 13023 - DNA, 2430 bp, Homo sapiens
ccactcgggagccgcaacctagaagccagagttgtgtatcagattcaactaggagaaaatcccacctccaggctccattaatccttccaatggagtggaagtttctctcacagagaaactagtaaggggatccaatgggaaaagaacgttcacacggactagaagacgaaaccaatggaatggaaaattgtcctcgcgttggtagaagcagccaatgagatgaaaagagcccgcctccaaagtggctgcagaggcaatggggtgaatcgtgctcagaggcgcgctccaatggggtagcagggctcgcccggccgccactaccccgcttccccgcgcccggagtccccacccacggccggccgcggagccgagtgctgacccgggtgagaggttcccgcggctcagggaagatggcggcagccgtggtgctggctgctgggttgcgcgcggcgcgcagagccgtggcggccacgggggtgcgcggggggcaggtgagaagtggcgcgggagcgagtagggggtcctgcgggctccgaagccatccggggccagggggtcccgaaggcgcgcagagccgcgcagagctcctgcctgtggcctctgcccctccgaggcacaagctccggggctgtgtggtgaggtcgaactggtggctccggagaacgagctggtgctgattcccgccctgcgcaggccggggcgccgaggtcgggacagggtcagtgcagcggctgccgccttctttccactgcctgcagcccagctggcccgatgccccctgcaggaaatgagctttctcttcttggagccagtgctctgccctcctcaggcttctggcctcctaatgagcactagtgttaacctctcttctgcacttgccagaagcggctcggaggtcagagaattcattccgtcccgttctcccccaacgtgatgcaatgacatcagccttctctgaatcccttacccgaagttccctggggctaggggagcagaggtcacttagctgaactcttacctccactcattcaagggacaagagttaaaattcacagagtcacatgtgacacccagatgaggggtcaactagtgtcaaacagggcgattgcattaaaacttaaataaaacaggcgacaaggcttaaagatcagaaaacaagtaacggaaataagtggaaatgtactaacaaggtgagagtggaaagagattcaagccatcgcaagagattatggaaaccatccctttattttatattagaagctgagagaaggaatttatctgaggtaattcagtggtatggtaaggtaggaactgagaccaaaatccccagtctctcattctagatcctttccctaaacagtgctatatttcgtggacacatgagcaggaatcaattgcactgctgaatcctgataataataccgcctgttatctaaccaggtccagcaccttctggccctaccctttgctgctggtgctctgaaattcaggaactttcctcctgggtgggaacgatgaataggttattagaaggacgaaattaacaactatcagagcccagcttctgccagctccctcctttgaatatggtcgatccaccttcaggtccgaggagctgcaggtgtgactgatgggaatgaagtggccaaggcccagcaggcaactcctgggggagcagccccaaccatcttctcccggatcctggacaagagcctcccagctgacattctctatgaggaccagcaggtggggtgctcttaggacctatccccttaggaatgttgtagataccatccaacctgttgaagtaacgtggcctctggcctgtcacttcccccagtgtcttgtgttccgtgatgtggcccctcaggctcctgtgcacttcctggtcattcctaagaagcccattcctcggattagccaggctgaagaagaagaccagcaggtgggaagaacagggccagggtttggctgggaggagcccctggacccagctagaggtcttgctccctatgaatgaagccacctatgtccctccgctctctctatagcttctaggacacctactccttgtggccaagcagacagcaaaggctgagggcctgggagatggataccgacttggtgagtgacttttggcccttggtccctcacctatgaattctcattcctacttctcaatatgatcttcattcttcgacctctgccatgatcctgactccctaaccccaagctcaatttcagtgatcaacgatgggaagctgggtgcacaatctgtgtatcatctgcacattcatgtacttgggggccggcagctccagtggcctccaggttgaacctgccaactgattaaaggacaccagactctggatgcttggatggaaagggaaaaatggaccctgtgatgctaataaaactgttctcccttaa

SEQ ID NO: 13024 - DNA, 2373 bp, Homo sapiens
tgtctctatggcaacccagtagctggagtctgaagatggagaccaacgagtctacggagggatcgcggtcgcggtcgcggtgagagccgcagctctggctgcaggcataaggggacgaggaaggtcagctgacttcctctgctgcgcttttgacagccatgtcgtgtttgctttctttcagatctttagacatacagcccagctccgaaggactggggcccacttcggaaccgtttccttcttcagatgacagtcccaggtcggccctggcagctgcaaccgcagcagctgcagcggctgcatcagctgctgcagctactgcagccttcaccactgccaaagcagctgcattatctacaaagaccccagcgccctgttctgagttcatggagccgtcctctgaccccagccttcttggggagccctgtgcgggacccggctttacccacaatatagcccatgggagtcttggctttgagcccgtctatgtttcctgtattgctcaggacacttgcactacaactgaccatagttctaatcctggccctgttccaggctctagctctgggcctgttcttggttccagctcaggtgctggccatggctctggctctggctctggtcctggctgtggctctgtccctggctctggctctggtcctggtcctggctctggtcctggctctggtcctggtcatggctctggctctcatcctggtcctgcctctgggcctggtccagacactggccctgactctgagctcagcccctgtattcctccagggttcagaaacctggtggcagatcgggtccctaactatacctcctggagtcagcactgcccctgggagccccagaaacaaccaccttgggaatttttgcaagtcttagaaccgggtgcccgaggactatggaaacccccagacattaaagggaagcttatggtttgctatgaaactttgccgcggggccagtgcctcctctacaactgggaggaagaggtattaaagttttggcctgctcccttttcttgaaggctgccctcagtttcttaggggaggcagtagtttacatgagggtgggtaccagaagggatattatagtcattcaacttgggatccacagagagccaccaaccacctggatcaagtcccaagcatgcaggatggctctgagagttttttcttccgacacggacaccggggactgctgactatgcaactaaagtcacccatgccctccagcaccacccagaaagactcgtaccagccaccaggaaacgtctattggccacttcgaggtgtgaaatgtgagagggtaggccagaacgagcccattactcagagggaagaagaggaaggaatttctggtggggctgtggattctccagtggatataagggcggaaccccaaggttcttcttccttttctcaagttagtttcttctgggcctccttcttaaccagaccccaccttgcccaccccccaactctctcacagggaagcgtgaagccatgctggagatgctcctgcagcatcagatctggtaagggattgggtaaaggggaagagggatggggaggagaaaaattgggtgagaatggccttgacacccctcgggctacatagtaaagaggtgcaggcagaacaggaacccacaaggaagctcttcgaggttgagtctgtgacacaccatgactaccgaatggagctggcacaagcagggactcctgccccaacaaaggtgagaacccaccccccatcccccgccacttgcaccagctgggctctgacaggctgtggccaagtaccaagcccagaggttgagagagagggctgaaggccaggagttactcagtaccctccctcacagcctcacgactaccgccaggagcaacctgagaccttctggatacagagggcaccacagctgccggtgtgtgagggtgactaggtgttgggggcagagcggggcaggaaaggtagggcagagttgttttgttctggcttggggagagtgggatccatcctcatcctggcactcctccagggtgtcagtaacatcaggacattggacacaccattccggaagaactgcagcttctcaacaccagtacccttgtctctggggaaacttttgccctatgaacctgagaattacccctaccaattgggagaaatatcttcccttccctgtcccggaggaaggctgggtggtggaggggggagaatgactcctttctgaggggtgaggagggaagtggggtatggaatatggaatctatttctgtctgcactagagaggtcgggaggaagttaattctcactgtacttgaagaggctttacataaagggttctctctcatcccaaga

SEQ ID NO: 13025 - DNA, 317 bp, Homo sapiens
tggtgcctcatacctgtaatcccagcaccttgggaggccgaggcaggaggatcacgaggtcaggagatcgagaccatcctggctaacacggtgaaaccccgtctctaataaaaatacaaaaaattagccgggcgtggtggcgggtgcctgtagtcccagctactcgggaggctgaggcaggagaatggcgtgaactcgggaggcggagcttgcagtgagccgagatcgcgccactgcactccagcctgggcgacagagcgagactccgtctcaaaaaaaaaaaaaaagaaaaaagaaaaaaagaaaaaaaaagaaaa

SEQ ID NO: 13026 - DNA, 44602 bp, Homo sapiens
gattgaaattaggcccagctttgtatgattctgactgagaagtctggtaggtctagggcagtattcagctagaatgcagaagacaaaagtcttttccaataagacttcaccttgggctttaagttgtttctttactgaattctgtttcagttgaaggagtattcacagaaggctgtggagattctgcggactcaaaaccatattcttaccaaccaccccaactcgaacatttataagtgagctttgttttgctttctacctgtgggaagctcagtcagcattctgaggagttatttgcatggtgataggctcttacataggaattgacaagcgcctgagagaagagcgaatctgcctagttgagattccaatcccctccatgtaggccagggtcttgcaaatagaaggtactcaaaatgtcattgctgagttcagggtttggtgagtagtaatgtagaaaggtctgtatagcctgggcaacatagtgagacttcatctcttaaaaaaaaatttaaaaaagttagccaggcgtggtggcgtgtacctgtggtcccagctgctggggaggctgaggcaggaggatggcttggggccagaagttcgagggtgcaatgaactgtgatccacgccactgcactccagcctgggtgacagagtgagaccctgtctcaaaaaaaaaaaaaaaaaaaggtctttagtttcaagggtttaagttaaataaggtgaaacaaatttaaagaaaatgtcttcctttttttaaaaaaacttctaaaagaggatattggttaaattgacagtttattatttctctggtttagtagtgactgttctttaaaaaaaatttaaaaaaactttattgagataatttatgtattaacctattttaaatgtacagttcaatgatttttagtaaatttaattgtgactcttgagtcaaattttactactttttagaattcctctgaaggatagatcaaagattaggaaacatctaaggtcagttagttgaaatttctttcctgtggcttcgtaaccctattgggatttctcctgtgtccttgagttctcactagggtggggctcactttgggctcactttggctcacattgagccatggctttgtcatgatttttttgtgaaactcagtgcttcctaagatgaaaatgtgttcatgctaagactggtttcttccttagcactttgtctggcttagtggagtttgatggctattacctggagagcgatccctgcctggtgtgtaataacccggaagtaccgttctgtgtaagtaacatctgtacatggacagtcctgaggccaataggtccagtgggattcttgtttccagagatggatcattatcacatagatgttcctctcctaatggttggtcaccgatagtaggaatttttatctgccacatttattaccttaaatagaaacttggctgggtgcagtggctcaagcctataatcccagtactttgggaggctaagatgggaggatcccctgagcccaggggttttagaccagcctgggcaagatggtgagaccccatctctacaaaatattttttaaaaaattaaatagaaacttcatcttgtggatgaagagtgggttacactgatgaatttttaaaaaggcagtacgagtcttgaactaataccatgttttgtgaactcttgtatttagtatatcaagctgtcttccattaaagtggacacgcggtacaccaccacccagcaggttgtgaagctcattggcagtcacaccatcagcaaagtgacagtgaaaatcggggatctgaaacggaccaagatggtgcggaccatcaacctgtattataacaaccgaaccgtgcaggccatcgtggagttgaaaaacaagtacgggctttttaggcctcgggaggggcagcaggttgtaaggctgaagctcagttgctgccttcggttcctggaatggagtaaggcagcacatccctagaggcctaatacatcctcttggcccctccattcatgaccaaaggacaaaagtgaaacaacagttctaagcatgttgacaaagattatttctaaattagcccagtggagccataggggtctgtggaagttcctcaacagcctgcctagggaggggaagctgagtgaggggacctccaggcttctcatgcccattttaactattcttacacaaaggtctagacttagataaaaccttctgtattgggaagtaattgtcatttcttggattaagacagctatgctcttgctcacagggcagaaagttatttctcaagaagcttctttagtacacacactcttcgatttccacatggtgccttttctctgtatctgctgatactggatcttcctagcccatgtatcccagtgactgaaccagggcatgtcatatttaggccaagagaggcactcacatgggttatagtgttgactttcacagagacagatcgcctttttttgaactctcaggcattgctactgaagggagaacacaggttgacactacttgaatagtaagacttacagagctgttctgcacacaggatggaagtattgctgttattccaagaggcagaataaggctcatgtaccacagcaacacgtggccatgaaggctgcctagggaggttttctcttcttgccttgaaaagcctagtttaaccttggtgacctgaaagtagatgctgcacattagggtggcccattcccctccagaggaggtgggtttgatttttcattgtgtggagtcagcagagctactggtagactatttgggttcagatcccagctctgctacatagctctgtgaccttagagaagctgcttaacctcagtttctgtaactataaaatggaggtaggaccccacttccagggtttaaggattaaatgagttagtatgtgtcaggtgctgagaacagagcctagtacatagtaagtactcagtaaatattagctctcattgtgttatataatcaccccaaaattattacataccttcctctttatgacttgacttagcacttggttcagaccctgattttcttcctctgcctctctaaaatagcctgggtttatctttccaaggttgctgtcaggatgggaacttggcatgcatcatcattgcacctcttacaggcttcagtgtggcatgcttttggagtcatggtttcccttgttatatacttctgttgttttcctggaatttcaaaaggtatcatgtataacagcttaaagcacttgtatgttctttcctttttttatagagaaaaggtagtagaaaacttttttaaaactggcttcctattatatgccagatttcttttccttagagtaaccacttaattgccttagaaaaatacatgggacagtcttcctctttgtctcatcagactgttatcactgagggttagatgagaaaatctcaaggctgtctgtctttcctaggccagctcgctggcacaaagccaagaaggttcagctgacccctggacagacagaggtgaagattgacctgccgttgcccattgtggcctccaatctgatgattgagtttgcagacttctatgaaaactaccaggcctccacagagaccctgcagtgccctcgctgtagtgcctcggtccctgccaacccaggagtctgtggcaactgtggagagaatgtgtaccagtgtcacaaatgcaggtaagtcattggtcatcccctaggccagggctgtgcacattccttgttatttttctgtagtagtgtcagtgtgagcaattacagtgtctgattccctcagaacatttagagaattatgggtttgtagagtgggttcaagggtagaaagggaggaggaagaagagagagtgagtgagtgtgtgtgtgtgtgtgtgtgtgcatgtgcacacgagtgtgtctgtcctgtggcaggggtggagggtaagggcggagggaggtccagaagtttagctctgggtcttgctttcttgttacctggctgcttaagtcattcatttgttattgtcccttcagtagcccctgcagtagttaccagagtatataaatgtggcacaatccatttcctcagagtgacccccaccccacccagccttgtcaccttactgacccaaacgctttggttactcagatccatcaactacgatgaaaaggatcccttcctctgcaatgcctgtggcttctgtaaatatgcccgcttcgacttcatgctctatgccaagccttgctgtgcagtggatcccattgagaatgaagaagaccggaagaaggtgaggccagatctggcctagactcagggctgtggccttgatctggactttgggcagacctggtgcagtgcagtgcactttactttctagcctaagccttcttcgactcaacaccagtttcagggcccagcttttgggtgggagcaaagaatggcatgaggtatattgtattgaaagacatggtttgcataggattttagaaaagtgttgattggtaatgaaactagagtatctccaggtacagataactttggatttggatgctttgccctgcatttcttccacagactgcttcatattgaggctgctggccctccctcagtattagattgtccagtgctagttcccagcctgcataatatgggcaggggcggggggaggttctagatattaaagaacagtgaaaaaggggcacctatagggttaacagaagaacatttagctttggagtcagaaggacagaaattctaattccagccatacttttaatacttgtgtaacctagtataagttacttctctcagcattgtattattatatatcacagatgtgtattgtatttttattagaaataatatacccacctcacaggaaagattattgtgaagaacagagataatgtatgaaacacagtgcctgacctataggaaatgttctggtaaatggttagcagtgaggattactcagggaaagtcatcagccaaaaagccttcactcagtccctgtcttttcctgtctaggctgtatccaacatcaatacacttttggacaaagctgatcgagtgtatcatcagctgatgggacaccggccacagctggagaacctgctctgcaaagtgaatgaggcagctccagaaaagccacaggtagtcccacgctgcaaagggcatttggataagggcttgggtcttgatcagaagactgcctcctaggtgagatcaccttaggtggggagcctgacagcttacctcttggggttgcaggatgactcaggaacagcagggggcatcagctccacttctgccagtgtgaatcgttacatcctgcagttggctcaggagtattgtggagactgcaagaactcttttgatgaactctccaaaatcatccaggtagagagcggggagcagcttttgggtgtgttttgtccaagtgttactggtgttgttttcacagcagtcctgctgctctctcatctagcagtccaggtcttggtgttgtccctgcccaatctagctgaaaaggcaggcagatggctgcaccaaacggcatctcccccaccgtgatttatggcgctggtcagaatgctgagttcatgctagataactgaacatactggtgatgggaaggtaacacagataagggttttttttagccattaacaacccatctcttagtagaggggttactggtcttaaaaaatttgatgccaagattctgttccctcttctgataacgccgtgtttgcaggctgtagggtaagggcataccaactgcaatcaaccagggtgggccttgtgtcagttgcaatgtcacagacctaatctccatgagatgggaggctggccatagacagaggtacctcatataaggagagcatccagtttaccttccccctcaaccccaaattgctggagtgccatctttgctacacgtgtattagcttctgacctttgtctttgttacatgggagttaagagcataagcctgccatctgagtctgagttctgactctgccacttatcttggtcaagccactttctccaagcttcagtttccttctctgtaaaatggagataaagcatctaaccagttgggttattgagaagattaagttatataatgcatgtaaagttttttctaaagcaaaactaattttctaattaacatcctcttcttattttaattgctaattcccattattgttgcctttttgttcttagaaagtctttgcttcgcgcaaagagttgttggaatatgacctacagcagagggaagcagccactaaatcatcccggacctccgtgcagcccacattcactgccagccagtaccgtgccttatccgtcctgggctgtggccacacatcctccaccaagtgctatggctgcgcctcggctgtcacagaacattgtatcacactacttcgggccctggccaccaacccagccttgaggcacatccttgtctcccagggccttatccgggagctctttgattataatcttcgccgaggggctgcggccatgcgggaggaggtccgccagctcatgtgcctcctaactcggtcagtacctacaccatggttatgggcctagtggttcctactgacactggcagccatgccaggagcgttagagagtgcacagaatagtgcttctgaccacccagcaagttaggtagcttataacaaaggaaagatggaaagagacacagggtgtaggtgagcgagcttggggagcattgaaacccaggtttccttgtaaatggcatgattggcttgtgcttttttggttccagtacagtgtcttgaggaaactctccctgaggccttgtgagggaagggaagggagacacttgaactcgagaaagactcacatgaaagaagcagagcagtggggcctggagattaagagcttggactctggattggaaaggctcagtttcagtatctgataccttgtactatacgccttggacagattccttaatttctctgagtctgtgttttcctcatctgaaaaatactgacagtaggctgggcacagtggctcttgcccgtaatcccagcactttggcacctgaggctggcagatcacttgaggtcaggagttcaagaccagcctggccaacatggtaaaacctcgtctccattaaaaatacaaaaatagggccaggtgctgtggctcatgcctgtaatcccagcactttggcaggccaaggcgggtggatcacctgaggtcgggagttcaagaccagcctgaccaacatggagaaaccccatctccactgaaaatacaaaattagacaggtgtagtggtgcatgcctgtaatctcagctacttgggaggctgagacaggagaatcgcttgaacctgggaggcggagattgtggtgagtcgaaatcgtgccattgcactccagcctgggcaacaagcgagactccgtctcaaaaaaaaaaaaaaaatacaaaaatagggctgaacaggctcacacctgtaatcccagcactttgggaggtcaaggcaggcagatcacgaggtcaggagttgatcatgaggtcatggcaatgtctcagcagtgggctgcatgcctaggaagtagcaagtgggtagttgagagcaggcacctgccaggaatgctagggcatcacaaggaacccgtgtagctggagacagggatgcagtagggaagactcgggaggaggcttaggtcagagggtgcgagggccagatcccatagggtcttgtgggcctctgtaaggactttggggcttattcagtatgttgggaagcaagagtgagtgatacggtttgtgttttttattaatagtgggaacattgttacaaagagacgtaaactggaatatgagggccttgtggaaaatgaaatgcaggcagatggagaagacagggaaagagttgtgaccaagactgagagtggacgtctaggttttggagactgtgtcacaccagacagcaggggctctgtcgcctgggacatgggccccataaggtggtgctgctcttccctcagttagcttctgttcataggcaaggcggctgtaatgggccctttattattaccgaccacggttttgtgaagctaaagttctagtcttgccccgggaaggaagtagaaaatttggggccaggtagccttagacattgatttcattttccctgggccccttcaggtggaaaggagtgtcacacctgattgtgaattataggactccatttctatttgcttctgcagagacaacccagaagccacccaacagatgaatgacctgattattggcaaggtctccacagccctgaagggccactgggccaaccccgatctggtgagccggcctagcaggcccagctgtcctctctgacttcccctcacatgccttgtgtttctcagcttcccctcccaggtcctgcggtgactgaggagggaaggagcagaacattaccccagaatggttttcccagggaagagcctggagcacaagggtctccgtctgtcctttgtctctgttggagccacctaggaccagaaattgtattaatagttaagagtcgctggaccggagctgaccctcttgactcatgtctcttcccattgccttctaggcaagtagcctgcagtatgaaatgctgctgctgacggattctatctccaaggaggacagctgctgggagctccggttacgctgtggtgagttaggggattttcagagaaaggaaaggaggctcaaaggagcagtcctggccggactgggaggggaggagggaaactgatgcttgggcggcctctgcagagcagatgtgtagtgttcctgattgtgactctgcctttcctgaccatccctagctctcagccttttcctcatggctgtgaacattaagactcctgtggtggttgaaaacattaccctcatgtgcctgaggatcttgcagaagctgataaaaccacctgctcccactagcaagaagaacaaggtactgggccaagcaggggtctaacaaggaagggcagggcggccaccctcctcattccctggcagtgtgccctgcctcctcatggtctccgctttgccttgagcccacctcccctgagaggctccagtgcagcctttgccttagttcagcagatatgggttgggatttttgagaaggatggttcaagtaaaataaacatgaaactgcaaagcagagagcaaagtggctagctgtgaaggatgaactctttccagtcatgttagataacttgcagcccccagaaagcattgtgtccttcctacccctgtgcctttgcacatgcagtgctgtgcggtgatagaaatcccaggctctgaagcagacttcctgagttcaaattccagcgcttccatttattagcatcatgatgttgggcaagttgttccttagtttccccatctataaaatgggaatatagtctccaccttgaagtgttgtgaaaaataaatgacataatgcagactaagtgatcaaaacggtgtctgcctaagttaatccttaacaaatgttagctgtggctatctcctgctttctttgcctagaatgttttccttcactttgttagctgctccttagagggtcagttctctactaggctagctgtgagctccttgattccaggaactggaccatcttagtaatactttttatgtctagtatataggatggtataacatctataatagctgcttagtgaattattattaagtgaataaatgaaaccaagtttttatcctaaaataactgtagctgagccacagattgacttgcttgtatcagcttttgaattgggaggccatagttctttctttgggccatgcctaaggctctgccaccaacttgccctggattgggccttgggtccttctgactcctgttctgtctgatgggccatcccttttgggcaacagagtcctcatggcaggaagattgctttttgagtgctaagcactagggttatgatgtggggaagctggacattgaagctgccttcagaaaaggcagcacggggcactctgcttccttccctttgatggaggaattatttccccccagattcccagcaactaaaatcagcccttggttgagaagaggacacccatccctatatgaccatccttgtttccacagtgggaggcaaagggagatttttcacggaattacttgccctgtaaggactgaggcctggtgtggatgttcacaatttgctccgtgtaacttagcgagagcagcagttcctaaaatctggctcacagactccggggtgttcttgagactgtcaaagatctgtgaggacaaagttattttcataattgtcctaagacactatttgcccctgtaattcttctgatgtttgtgctgacggtagaaaacctttgctgctggggagacagccagtgccttaggttgacgaggcggtggccctgtgcagttcttcactgccacccggtttcatcaagaatatccttgatgaaacagtacaaattaattttattaaatctccactcttgggtactaatctatttaatgctcagtgtgacaaaatgagtacacagaaagcgcctctgctgcaccccaagtacagcagttgtgctgagaaaaggcacttgtgtgagatgcaagccaaaccagctgcctttccatggatctccgcttgtgcttgaaaaaaatggctgatgggcaaattgtggttgttcaggcttaggtatttggcagatttttcctcaaaatgaatgaagtgagctttaagaagaactgacataactgtgtaaaccagtgttttctaaatgaccaatgcatgttatagtatcctgccgggtaaaagatgaaggttagtgtaatgaagtatgaaaagtttattgatgtgatttcagagtccatactacagctaatctttcagaccctgtaatttgttgagttttggtatagtctcaatgaaaaaaatccacaactagttgaaaaaggtattaaaatattctttccttttccaactgtatatctgtatgaggccaaatgtttttcatatacttcaaccaaaacaacctgtcatgacaatttaactatagaaaccgatatgagaatccagatgtcttataaagcagtcattaaacaattatcaaaaatgtaaaacagtgccacgtctttctgtaggttatttttgttttggaaaatataaaatttatgttgacaaataatagatttactcttctttttcaatgaattaacaaatatcttcagaatttctcagtgttttattttttattttttttttgagacagggtcccattctgtcacccaggctggagtgcagtggtatgatctcggctcactgcaaaccctgcctcctgggtgcaagcaatcctcctgcctcagcccccttagtagctgggactacaggcatatactaccgtgcccagctaatttttttgtattttgtatcgaaatggagtttcaccatattagccaggctggtctcgaactcctggactaaagcatcatctgtctgccttggcctcccaaagtgctgggattataggcgtgagtcaccgcgcccggccagttttagtttttaacatgagaaatggcaatagatacaaccatgtaaagcaaagctctctggagtccgtaataatttttgaagattgtaacagggttctgaggccaaacagcttgagacacgctggactggagtgtcatctgtggctctctctctgcaggctgcttctggttagtgacagtttgcattctggaggctgcttgtgaccctaggaaggtttttgcttaggaaactgcaaatcagccgtgggataggaattagtgtaagtgctataggattgtaggaagccagccacagcttctgctgcacaataaaaatgagtgaccttaagctcaatgtggagatgctgctgctaaattggatcaaaatggtttaacaggaacacatatttgggcataagagatacacgtgttgatcctcctgatcttcttgcctttgcacatcaccccctggggcaccagtgccatgctgttggggctatggctcaggtgtgcccttgagcgccctcaccttgctccacttgcctcctccaggatgtccccgttgaggccctcaccacggtgaagccatactgcaatgagatccatgcccaggctcaactgtggctcaagagagaccccaaggcatcctatgatgcctggaagaagtgtcttcctatcagaggtatatctttctcttcaagacgccgggaagtcctgcctgcgctctgacagccctgccttctgtcactctcatttacttacctactacccctgcaacccttggccttgcagggatagatggcaatgggaaagcccccagcaaatcagagctccgccatctctatttgactgagaagtatgtgtggaggtggaaacagttcctgagtcgtcgggggaagaggacctcccccttggatctcaaactggggcataacaactggctgcgacaagtgagtggccacttctggactcttcaccccctgcgcccctgaccccagactctgagcaatatgtttctgcccctcaccatgtgtctgcactgccatctcttctttctctttgctcttcttgcttcctttcaaatagggagtgagtacaggttcttggttgtagctgttgggctagcatggtggactggccgaaacagaacttcctctgcttatcttaacacgctccttgtgctttctgctttcctccctgaccatagtcccttttctccttccatttttcgtatcttctgctgtcctttctctccctcctctctctagctaaagtaattctatgttaggtaatccatttgtccattgatatataaaataagaaatacttggtttacatttaaatgaaagtattcagcatataagtgtccccaaaaaagaatgatcagcatctttgctaaggaagatccctttttcctacttcacttattgtaggtatgttcttcacatctcctgatggagaagtctccaggcagaagcagggctctttcacagcccctttccccatctaaaacagtagagtcttgtgttagctggtgatttttacctcttaacattttcctagagaggtgcccagaagacctctcctagatgggtggcagttgactgccctgctgggggcctggtgaggcagggcatcctctgagtctacgaccccttctctcccctgtcctgcaggtgcttttcactccagcaacgcaggccgcacggcaggcagcctgtaccattgtggaagctctagccaccattcccagccgcaagcagcaggtcctggacctgcttaccaggtaccatttgggagtgggatgaggagcgtggttagacttgctctagagccttttcatcttccccggggaatccatggatcagggtaatgagaggcacacctctgggtagaagaccccagaaacaacaaagtgttaaaaagctgacttttagtgatggtagtggtggtggtcgttgtggtgagggtgttagcagcagcagcagctaatatttgagatcttatgcagctaatattgatcgagattgagtgcataaatgcttggcatgcattatcttatttaattctctcatagcaatcagtgccaaaatatgaatgcttagattctgtggcattcactccctgcagtgtgctctgaatgcttcctagatgtgggaaattcccatgtgggaattggagctgtcttggatgctgttcctccaccctctaggaagcaggagagacagacagcagaagataggaaagattgggaggagaaaggggagccttggagctgttcgaaatgctagagttcttgactagagtgccctgtccctcttggtggcagttacctggatgagctgagcatagctggggagtgtgcagctgagtacctggctctctaccagaagctcatcacttctgcgcactggaaagtctacttggcagctcggggagtcctaccctatgtgggcaacctcatcaccaaggtatcctaccctattgcccaagagagccccttccctaattcccccttgtaccttgatgtaaactctactatggtgttttgtttgtttgtttttgctgagaagaaatatttgttgaaggtgtttggaaatatttttatgacttcattgtatttattatgtagctgtagcaaactcttgggagcatttggactgtttacagtttttaagcaatcccttaccagcgctgtgactgttggcttcctggaaaggagttctgcaagggttcgattaagaagatgtaactacagagtgtctggtgctgcaagctcctgggacagtggtggaggtaactggtatccttggcagtgatatcacactgactgcacttgtcatcctgtttaggaaatagctcgtctgctggccctggaggaggctaccctgagtaccgatctgcagcagggttatgcccttaaaagtctcacaggtaaagagccacctggaccttcctttagggcatcctgaatctgtttagggacaacccttagttccttgggtgctggggttgactctcttctctctggtactgaccttagtgcagatttaagctctgcattttttttctgtattgatacgtttatgattttgagaccctgtttgctattgactgtttccgcttgttgaacacctgctctgtgccatgcacaaagatagattttccctgctttttgagttgctcataatcttttgagacacagactgtccttatgttttcatccagagctctcacagcaacattttcctgtctccacaggccttctctcctcctttgttgaggtggaatccatcaaaagacattttaaaagtcgcttggtgggtactgtgctgaatggatacctgtgcttgcggaagctggtggtgcagaggaccaagctgatcgatgagacgcaggacatgctgctggagatgctggaggacatgaccacaggtagcactgcccagtggcctggagcctaaggcactgtcccttctggggctgccgaggtgcattcgaccaatttcccccagttccacagatccagaggaggggtggcaaacatctccctgcattcaaagggagactcatttcttgacaaagtgttggctcttggaattttaaattctagagctgggctcagtcactttggatttttcatgttgagcttatagagtggtgcaaggtcaaaggctctctcattggtgtcttctatcagtctggaaaattctcagccattgtctctttaatcccctctgctgtattctctttcttttccttgtgaaactccattttcactctgtcatccatatctctccatctctcataatgttcatctcattgtgtatttatgctgcatttttgacaatttgttcaattcagtttttcttcactgtgtgcaaatgtttaatctacctgttgaattcttgtggttctagattttatggtctcttttttatttttcattttttgagaccaagtttcactcttgttgcccaggctggagtgcagtgacgcgatcttggctcaccgcaacctctgcctccaggattcaagcgattcgcctgcctcagccttactgagtagctgggattacaggcatgcaccaccacgcccagctaattttgtatttttagtagagacgggatttctccattttggtcaggctggtctcgaactcccgaccccagatgatccgcctgcctcggcctcccaaagtgctgggattacaggtgtgaggtctctttttaaaaattcacatttccctcctttatatgatctataagcatattaaacatttgtgtctgataattctaaaatttgagatatttacatgcctgattctgcagtttgttattttggctcttgctgatgataccttaaagtcttgttgtgttttatgagttttgactgtgacctcatattttttagctttatctgtggaaattctttaggactgggccaaagatgggtttctccagaggaggtaaagaactgcttctgtgaggcagtgcagggtactgctgtcccagttctgagcctcaggattttcagacctcctaggtagtgagaggtttgagccgcaaacccctataaggggacagctcattacaagttttcagaggagatttttccctgccacttgatggtaaagtttaaggaaagtcaatttcctcagttatttggttgggggaaagggatagctgatctctgcaccaagggtgtagctctttggggtactagatttgtatttgtggggcatggggttgggggttcctgctagactctttgcctcagtggattcggggctttatccacctctcaaatctgggcagggcatggaaaccaaagctcaacgcaaaaactgactcgtgttttgcttatctccctggcttcccgatttctcttagtttatggcttttggctgttctgtgttagtgtggcagttcactgatggatttttattcaacactttaaattgtttttgagtggtggagagtgaggagtaggtcagggaacctcgtttgccttattgcccaaaatggaactctttctgatgccattttcatcgtgccatactgagctggtttgtgacttcgtcagggacctttacctttttttttaattttaattcagacccacccagtaatgcaacagtgggactttttttttttcccgaagtttcactctgtcacccaggctggggtacagtggtgtgatcgaggctcactgtaacctccgccttctgggctcaaaccatcctcccacctcagcctcctgagtagctgggactataggcgtgtgccaccacgcccagctaattttgtattttttgtagagatggcatttcgccacattgcctagcctggtctccagcttttgagctcaaagtgctcacaagaccttattttttaaagaccatattttctcaccttcatgttactttaagttgtgttttttcgcttatagaggacagtctacctaatcttttagaatgaagctaaaaactaactgtaacttccttttgatttgactggaacacaggattatttgacattttctgagtgcctgttttgggcaaggagatgctagttaaataaggcacagtccctctccttgaggaggttatatcctgagagagagcaagacatgtacacagccaaccatgatgaagtgtgtggacttgggtgttatgggtttcaaactgaatgtggtctgaggataaaatcaatcagcatcaaatttccaatttgaactattgatattgccatgtagggcatttaaagacttaccaggcagaaataatttgtcagtgatggtacttcagttagaattctcatttcaccttccatgggagaggctctttcctaacttggccgctttgatttctggcaggtacagaatcagaaaccaaggccttcatggctgtgtgcattgagacagccaagcgctacaatctggatgactaccggaccccggtgttcatcttcgagaggctctgcagcatcatttatcctgtaagcagtgcggtgcttcccatggctctcgagtgtcagcacagcccactttgccatgaagcctcttggtgattcattaaagttatggggaattgtaccagctgtgggccacttagtcattagtgaaagaagatccaccgccataaaagtgaagcaacctcataattttcctcttgctaacgatgggacatttaatgaccttccttggtcttatttcctagattcaagtaaagaatcatgtttttttaaaaactaggtctaacctccattaccaaaatcccattgcatatcaatccaacatactgtggaagaagcggtattgagcttgaatataaagatatttttactctcttccttctttagctgccctgtattttgtgcacacatgcagcgtgtgtttttttccctagcctgaactgtgtagaagcacagtatcatccagagaacccttcctgctattgaggaaagatgaacactagtatcatgagctagcaatgagagctcattgggggtgtgtacctgagtgtcatgtcccatagagaagcccttttcttgacttcagggtcatcagtgacaaagtcctctggccccaaattggttagcatcacatgagaccagcaggaggaggaaggaaagtccctcctcgcaccccttccccgattttttaatatatctctcatatgtcactccttgtctgcttgttttgttaggctttatctcctaatccaccctggggtttcagggtagatgcttgatattttagtctacttgagtttgtttagatttttggaagtacctctgagtttcctgtcctttgtatctttaaatgtttggggggcttgctgagtttggtgtgttttcctcgagtgtccatggaacaaggtagcatggtataaatctccacctctgccatcccttctgatgcacccttctgtctgtcctccaggaggagaatgaagtcactgagttctttgtgaccctggagaaggatccccaacaagaagacttcttacagggcaggatgcctgggaacccgtatagcagcaatgagccaggcatcgggccgctgatgagggatataaagaacaagatttgccaggactgtgacttagtggccctcctggaagatgacagtggcatggaggtaatgaccataggacagtgctgcccacgtttacgattaggggcttcctcctaggctaaccaaatccaggtgcttcttcctagtagctgattaacttggggcaggtggccttcagtttctccactctgtaagttggggttaatgattcccacctttctacctcacctagtgctaaggttaataacctgtaaagggctctgcccagtgcctggcaggaagtaagcatattgttaatggctgttggttgtagtggtggtgggtatttattatcgttattgcctctggcagagacttctcggtgagtctgagttacctgagccccctaaatattggcgttttaccccctgtgcaggtttatgtccccgtgtcagttactttctggcagaccgttgagggtctgacatttttacatagtgaaaagccttttctggtgctgagcctgcaggagaaggtccccggtgggtgtgtctaagctggagcctgtgtgtgggttagggacgttagcagcccctgaaattgtgcacaaaattctgtgtgtttttcatacgtgcggattttttaagagtgggagagttgataggtccatgacatataaaaattgtgaattatcaaccattgccgtaaggtgccctttgctcttggattttacttgtcttacaattatttggaacaacagcttcacctgcttttctgttcagcttctagtgaacaataaaatcattagtttggaccttcctgtggctgaagtttacaagaaagtctggtgtaccacgaatgaggtatgtgcctgctttctcgtttggaggtgtggtttcacttttctgacttatgcagacttgtaccagcaggagccattgttcatcatcacttacctggcttgtagcagctctctaaggctttactgtccctgtttggggttgtgtggagaaaaccaatcttgttttcctttggaggcatctgactaatggagggacatttaatgaccttcatgaagcttcaggaaagcaaaagcattttgctgggctgtgcaagttgtcaaaccccaagaactgaaagccagggggtgtcgaaggaggctctgtgctgggaatgcttgctgtcttgttcccttcagtatggacacctctcagctgagattagttctcagcttttatgggcctgctcgcttagtagaacatttttccagtagctgtgtcaaggagcatcatttctgttttactagttggggaatggaggctcaaacaggcagttattcttgaggaggggaaaagggaaatgaaggaagtccagcgctctgggccttttggccaccacgagtgatgctgtttgtccacttatggaagtattagatggtccccttcacctttccctcctttcttactctctgttccttccattcctctcttcctgtttctttttcttcccctccatttctctctccccctgccatttcttcccttctcttgtttctattgggaggagaggtctttagcacatgaatcagataagtaacttaattacagcaaactagtgtagcagggatgcacagcaaacttttctagacttggtcccaaatacttctgtagagtttgagaaactaaattggcagtatactatttgtagattttgatcttcaatttgttacatatttccgcctctctcctttcttttctcccactgggctgggaatcctgcttactgttgactgttggtctactgccagtggggtcgttgttgcactgttggctgagggacaggcagagaactgtcccagccagtacctcttgttacagacattgtagcatcaaaacagaacaatacagatttaatccctgatgcatataaaaaattaagaccaagcttctgtgggcactctggtaaatggtggtagtgaacccacagaatgcaccagggtatctcccttgaatggtgaagcaagatagaagttgagaatcatttgcccctcacattgatgtgcttaatccagttagaaggttttctggcaaagttctgagtttgtgatagcctatgttctgggacttcagcttcccttctctaccttgccctccatttccctgataagcagcctacctctgtagctactgactagaactagaacctgctctgtgttcagtgtctgtggtggttctctctgaggaattctcactgggcttctatagccggaaacacttctgcaactggcctttctggcaggttgtcttcctccagggtgtcctgtcctgaagctcagcatagacttggaggcaggctgcttgaattagcgtgctaccaaatcccccactggatttcatcagtggttactttgagctccaatttctagtctgcaaaatgagaataatattaatatatgtgctcagtgccagacatacagggaactttccttattctccaatttagtgaagttgctgtaattttgtcatttataaaagacttgattcttatcattctagtcagattgtgggtttagcttaaagaattgtggatgaaccccctccttgtatggttatataaagacgtctgaatctctgtaggtaaagattgatgtactctcttttcctgttttgattcccgaggcttgagtcaaagctctttgatttaaatggccttgtttgtcctgggtagtagtccctattgattggagacagtttctactcctgaggaaggtccaggcttggaattagacctccgcttatagcttggtaaccttgaacaagctgtgtaaccttatgtaaaaggatcatagaaagtacttaattagcataggacctggcacagagtaaaacattcaataaatatttgttagattattacatagtgttctaatgaaattgaaggagatagtgtctttaaaatgtttcatacaatgtctagcttctagtagacacaaaataaaattagcattctttcccctaagtgaattgctgtgcatttggattctagatgttgtggttgagactttgtagaaaaatagaggctctccacattgctggggctttaagcaagaccaagtatggagtcctttgcatttgtctgggcctgtttttaagtacctttctccaactttctctgctcagggagagcccatgaggattgtttatcgtatgcgggggctgctgggcgatgccacagaggagttcattgagtccctggactctactacaggtagatcatggcactgcacattggatctgaggcttgggactcatgagcggctcacgtcccaggacttaggggcattctcagttgcttctctcttgtacctctgcatcagaattgtggggagattgtttcttcaattgaggaaaaaaagaggtgtctgtggcatgatgcagataccactgagtgttcaaaaaaaaaaaaaagaataccagcaaacttttagaggaaaatgcaatgaacagtaaactggagttcagatttatttttaactccctctccccccactccattgatggtattggtgctcatactttgacatttgagtaagtaattttaattgacttgaaactttaaaaaagctcctactgagagtgggacagtttaatatcatccatcattgaccccttttattggccgtgtctttattggagatacggaaaagggctgtcagccatcagccaggaatagggctgtcttatcctggcctattttattcccatcttcaccttaccctccatttctgcttggcttcccttctcccctagatgaagaagaagatgaagaagaagtgtataaaatggctggtgtgatggcccagtgtgggggcctggaatgcatgcttaacagactcgcagggatcagagatttcaagcagggacgccaccttctaacagtgagttgggggcagcaagttgtgggggccagcctttctgcactgggagaggcccctgtggaaagaagctatggccactgtgtcattttaccctagagggcagcatggtgccgtggagcagtgcgagccagtgaaggacctggcagttaggactacattcttaggcacaccttttcccgtcctgctggcccacttcccttctccaatacctctctatagagccagcatctgactgtctttccccaaatagctgcacttgtgttaactattatcattgttgttgtttttaaaatggattttgtaatgtaactcatttcttgcattgtagggttttgtttgggtattcatccaactaatctccttagtgaggattagagcattccagagaggcaccacaaatactacactgttattttcactactccccacccccactcccccagggtttatgagaatatgtattattgttattattgtgcctttgttttaaatgacctatgtggttctgagctctcacaggccacgagctttgggatcattttctttactattagtttagggtctgagttgatgctgggatttcccccaagacaacaaacagagcatcacctcttccattaggaactgctgtcattgccgttgtattagagatggtagagatatatcccgccattggagctaccagcctaatgtgagagcccagccatctcaccatgtcccctgaagagccgcttctccctcctgtcctcttcatttcaggaggagcccctgctgatggtgtagaccctgcttagacatccctttcctactggcccccatgtcctacactctcatgtggcctcatgggttttgactggcttttcttgtcaggtgctactgaaattgttcagttactgcgtgaaggtgaaagtcaaccggcagcaactggtcaaactggaaatgaacaccttgaacgtcatgctggggaccctaaacctggtaaggagcatggactgcaggtgaagaagagtgggccttggaagtctgggtgtgaaagacctctcagttctgggctcagatgaaatggactcacggcttcttcaagcccttcatctctctggctgactggtgcagaggcttgggtcattcagctgcccttctcctctggctggctcacctcctgcccccatgctgctgccatggcactcaagagcttccttgctcctttcctgagttcagatcagagataagaggaaggcagtcccttaaacagtctagactacacaccagtgggaaagaagtgcccctctccttggggcagcaaagctgcctgtcatcaaaagctcacacgcttgtctccctctcagaacatgcatatacacgcacatacatacacacggtcatacacacatggtctctggggagtaaggctgtgagggcatccttgagagcaattgtcctcagcagttagtggctgtggtcttattctgagagtgactgagtctccttctcctacaggcccttgtagctgaacaagaaagcaaggacagtgggggtgcagctgtggctgagcaggtgcttagcatcatggagatcattctagatgagtccaatgctgagcccctgagtgaggacaaggtgagtggggctcggcccctccatctgcaggcactgagagcctgcactgtctcattgcccacaacaggcctgtttgtgtctggcttagcccacctgagaatggcggagcctgcttaagcattggaatgttaggactcaactaatgatgacataattgtatcgaaatgtgaaatctttggattcagagcaagcacaattgctaaggatagtctttcactcaaaagctgctcgttaatggaatcctggcatgtctcagttgatagacagaggctttagtccaacctttcatttcatagttgaggaattgaatagcccacttcatttccctggacttggcatttcctcagctgtggtacatagttggttactggtggaatcaggcctagaacccagatctccaactcccagaatttctctccacctgctatgcctgtaatttcctccattcttattggtgctaatgatttggctagagctatgaccaagtgaatgtccagcagcctgcattcttttacagggagggaagattgtattggtatattttgaccacctgagacaattaacagcactgtcacagaaatttagaaacgaatttctcaagtgaaactccgactgtttgttattccccaagaagtgccgagacatagttcttctaggggtattcctgatgactctgatggaagtggtgacttttggggctcagatgttggctgcagccacagtcctgactgcattaatggcatgttcaccctcttttctgttgcagggcaacctcctcctgacaggtgacaaggatcaactggtgatgctcttggaccagatcaacagcacctttgttcgctccaaccccagtgtgctccagggcctgcttcgcatcatcccgtacctttcctttggagaggtggagaaaatgcagatcttggtggagcgattcaaaccatactgcaactttgataagtatgttactttgatttcatatagtgaaatgagagtctccactaaaacgccgaactaggtctgtgagatgaggaagaatcctctgaatacctattagatttttgtgtcctcgttctggcttttaaggagctcagtctagttgggaagtgaatagttaaaatatactgtattagagtagcaattggctagtcagagaaggcaaagtggttggtgagatgggaggaatatgacgagatggagccacgtgtgcgcaaatgtgagtgcaagagaaggctgtgagcgtgggagacatagcaggtaaacagggagagtggcaggagccggggcagataggtctttgtgtcacgttagggaatttagccttgatcttctataggctgttgacagttgttaaccaagagggtgacatgactgggttttgtcccgcctttcacaccctcaaactctgctctttcctcctagatatgatgaagatcacagtggtgatgataaagtcttcctggactgcttctgtaaaatagctgctggcatcaagaacaacagcaatgggcaccagctgaaggatctgattctccagaaggggatcacccagaatgcacttgactacatgaaaaagcacatccctagcgccaagaagtatgaagccctcccgcagcggggctgctttgccttcgctttgccctttccttttccttctccatcagcatcttggcataaagcttcacgtgtgccccttgccctccttggggcctcccaaccgcttctggaaactatgtgggtgaccattcaaccactgcagagtcctcggggcttgccggaaaaggatggcaactttttggtttctacttagagtactcacttctttctggcttttcagctgagctgggtggttctatgtgattctttatgacactcggagagggtcacggttaatcatgccctgggggtttaaacaagccagagtcaacaactggtttctaggtagcctttgcttccctggcctgctaataagccttcctttgctttgcagtttggatgccgacatctggaaaaagtttttgtctcgcccagccttgccatttatcctaaggctgcttcggggcctggccatccagcaccctggcacccaggtgggtagccaggacaggtagtgtgagggtacaggggtacaagtataactaccctagtttaccttgagacatgacttaccctaatatatgagacttctagagtagaagtgagcctcagaagtcatctacttcatctatgtgtgctgagagaagtaagttgtatttgtgatttcctcattcaactcattcttaagtggggcttcattgtctaatgggtcacctgtgcaactgttgaactgtgagggattggctgaccagagagtaaaacacttgggtgtctggccacagtcactaggacacttatattaccatcacctctatcttctctgcctcaagcagctgaaccccttgttcttagggagtcccacccattccactccgcagctcattcctgatttctccccacagggctgagcgttaacccctcacaaatccaatcctaactggccctggatagatggccagggctgggttttttttttaaatcaaagttttaatttggagattattataaattcacatgcagttgttaagaaacaatacagagaaatcatgtgggtcctttccccactctcccccagtggtaacatcatgtggaacccgagcacacaccacaaccaggatatagacatcagtgccatcaggacgcagggcaggttcatcagcacaagggtccctcttgttggccttttgtagccacatctatcttcccctgctcccctgccacaagcccctggcacccaccgatgtgttctccatttctgtaactttggcatttcaagaatgttgtataaatgcagttgtacagaatgtaaccttttgggattgtcttttttttttttctcagcatgattttctggagtttcatccaggtttgtttaactgttcacccattaaaggacacctggattgttgccagtttttggctgttatttataaagctgccatgaacacttgtgtgcaggtttttgtgtgaatataagttttcatttttctgggataaatgcccaagagtgcagttgctgcgttgtatagtagttgcatattttgtttataagaagctgccaaactgttctctagagtagctacagcattttacattttacatttcaccggaaatgtatggctgctccagtttctctgcgtcttagccagcatttggtgactatttttagtttgaactgtttggaagatgtgcagtgattccgtgtggttctgcgttttcctagtggttcatgatgttgaacgtcttttcatgtgccctgtgtatcttcagtgaaatgtctgttcatgtcttttgcccaatttctaactggattgtttgttttttaatgttgagttttgagagtcctcagcattgcgttttttctgtttgtagtgttctgcattgaaaatagttccactgtctcatttggtaatctgtttcggtaactcattccaaaaacatggtaacttgagtacagtaaagattcttcactgtgtctcactgaaatcccttttctaaacttctgttcaactcagtggagtcataattgtatatatttgtggagatactttttcctgcataggaatttcacatgtattgttttccatatccttgtaacatctctcttttgtatatggataaatcaaggaacacggttgtgatttggccaaaggcaacacaatgagtttggaactcaaagtcagctgatttccaggcttattcttttttttttttttgagatgaagttttgctcttgtcacccaggctggagtgcagtggcatggtctcggctcactgcaacctctgcctcccgggttcaagcgattctcctgtctcagcctcccgagtagctggaactaaaggcacctgccaccacacctggccaattttttgtatttttagtagactcggggtttcaccatgttggccaggctggtctccaactcctgacctcaggtgatccgctcccctcagcctcccaaagtgctgggattacagacgtgagccattgtgtctggccatccagatttattcttagttaccaaattgaattactttctttagaataaggctttatctagttagatacttggcatttatgctatggccattcatttttcttgcaacacatcttgttgtgtagctggtcctgtgttagactgaggagacagctgtcgcctgtgcctgttgggagcttactgtctggtggaagatagagccaaatacagagtagtaactaaacagcgagatagatgcagtgtggaaggggcctcaggaaataggattgttaagtagagggcatggcacctgcaaaggttcagaggccaaagagagcttaaagccttccaagaattgaaagcagctgcagtcggaggcgaggcatggcaagagctgccgatggagatccaagcaggggaaaggcatgttctttctcccagaagaggagtgtgggttttctcctgagggcagtgccctggccatattacagagagtgaattgaagggaggtgagattggaggtaggaagaacagttgacaggcttttatcgtaattgaagtgagagaaatggcagcttaaactagttcatggatagattcaacagagattgagctgggaggaagaataaatgggatttggagagtgaccgaacgtgagaagctaagaagctgaatgaatcaagaacctgctcagtttctggaatgagtgatgaggtgaatggtggtgccactgagatggagaagatcagaggtttgcgagtaaggtggaggagagttcattagactatgctatgaatgtatggtctgtcctattaataactagaatgtaagttaaatgagagcaaggtctttgttttcccagcaccgaaaacacacatgtgcaagcatgcacacacagtaaacagccagaatgttgagtttggggtacctgtggaaaagctcagtaggagttgaaatatgggctcagcatttaggagcatgagacatgagggaataggtaatttcgctgagacacagattggaagtggacttgctgtgagaacagatttatgagctactgagtgatctgctggctgtgttattttcagcctgttgtctcatatgtaatcattgctgtcaagtcacttgtgacaggttggtgaggatttcagggatgtggtaatatttctcagtgagctcacctggagtgctttttccaactacacctgtctttagccttctgatgttctccacccccgtttatcacatagcgctatacgtagtgacttccagctttttcaggcacagaggtttcttgttaatatcttttttgttgttaaagtttttcatgtccatacctgcttgtagtcattgcacctctagtatccctagcctgagaaaactgtgctcctaggtttggtggacccaggggctcccgtggagaactcagggcaggtccttaggagaacgtccagtgcctgctctggctgctggttcaccactcagtacacatcaggtgttgctgcttgtcttaccagaatacggggatcttctcctggcccctttccacatcctctgtgatggatgctttgcatatgttatctagtttttagtcatcacagcagcccttgcactatccccattttatagatggaaatactgagcttagagcataggaattggtcagaggcagtggcagagccaaaccctcttccatttgtctgtgtctgtcaaagtgtggaatcaaaggacctgattgcagctgagcaggtgacatgagatggtgcatgctggttgagtttctaaacctttaagctcccgggaagaaggtttgtctacataattggaggcatgtgtctctctggtctcttactggcaggttctgattggaactgattccatcccgaacctgcataagctggagcaggtgtccagtgatgagggcattgggaccttggcagagaacctgctggaagccctgcgggaacaccctgacgtaaacaagaagattgacgcagcccgcagggagacccgggcagagaagaagcgcatggccatggcaatgaggcagaaggccctgggcaccctgggcatgacggtaaagctaccacctagagtccccatatttctgcccacactgttgatgaggaggtggccatgggacagccctggggttggccatggggaaagagaaggctggacagagtaggaggaaggaactaggtgtgttcggccctctcagaggtggaactactatcgttctatcatacagatgagactcggagtaagtgacttacgaagtttaccaaaacagtaaaccagtgataatagccattaagtttattgaggacttatttaagccctcaagtagttctaggaggttgatattgttatacccattttccagatgaagtaactgaaactgagaggtgaagtaaataggccaaggcacataactaataagtggttgacacaaagggttctgtgctcttctaactgtcccaccttggaggaagcagagtcctacaagctccttttccaaagcacagacttgagtgtcagcagttgaaaagctcacctgggaacagtgaatgaatcatagtgcaacaacccttggaagctgagacttggcattgctggcacgaagatgctggcatgaagaaagggggcttttctgatggcaggtggcaccttgccagggctccagctggatgacttcctttgcttcagtggttcctgtaggaagagagaatagcagaagggcctgggtctttatccttattagaagacagctcaagggctttcctctcatgcacctgtccttttagtggaggtagaaggttagccctgttcctgagcatctccaagctagggtgggagagggtgtgtggaaatccccttgacatgccaccggggttcccctacagacaaatgaaaagggccaggtcgtgaccaagacagcactcctgaagcagatggaagagctgatcgaggagcctggcctcacgtgctgcatctgcagggagggatacaagttccaggtacagctgctgggcctacggtcggtcctgagggcccagcctgaccccttgttctaggtagcatccccctcctccaggccattttgttcttagctaggcaagatcaaggcctgcatcttaggagattaacaaaaggaccagctgtcctctttagaggcaggaaggcgagctcatccgaactttagactttgttatctttatcatcatcatgacaaatgctgctcattggattcttcctatatgtgaggcctcatgctcagagctttgtgtaaactggataattttatttaaacctgtaaaaagtctcaacttgtggttaagcaaacaaaggtcacatggcagagccagaattccagcctaggcttctcagactccagacctgggcttttaaaaacataccatgctgcctccattcagggtaactggggagaaaatcagaactttctaggcttatccaaactagattccacctgaaaggagcagagcagccagtgacctgctggctctcctgaaggctcaaaggtggcctcttctttccagctggaacttactgcttagaatacaggctgtgaaagggcaggtgcctgggccacagggctcgttagtcctgcgtaatgcaggctcttcagagctgcccagcaggttttgaaaagcaagggaatatcaagaagtcacttctgcattttcagacagatgaagcacaaagtaaagaaagatggccgaggcttgcttatgtgtatgcctctgcatctgcaccgcatccccttcttgctggttgctcccataatccttgtttcactagggctgcggccagccaagtgcttcaccaacagactgaggggctggccttacctgctcttctgaacttccctagtgagagcaacctgaaacccaaggcattgcccaagaagggcggcagttcccctctattctgcttctcctgagcctgacttggagtttctcctcccctctccttatgttgtcgtctttgcagcccacaaaggtcctgggcatttataccttcacgaagcgggtagccttggaggagatggagaataagccccggaaacagcagggctacagcaccgtgtcccacttcaacattgtgcactacgactgccatctggctgccgtcaggtaggccctggctcttgcggaatggctccttcagtaggcctgcctgtgggcctggagcgggtgggactgccatcctcgtggttttaaatctgctccttagtctctggagagtagggtgttctgcctgacaccatataggtccccaagcagttatttgaatgataggaaaatatgctttggcctgggcccaaggctagtgagaacagccctgcctacctgagtcagcaaagccagtgtgtaccacattgaggctacaaatagcaaattctcttcgcagggtcaggagcctgggccgactgacttcttagtgttggcatgcccccacccccacccccgcccccccgcccaggtgcctggttgccacgttaatgccagcagtcgcttgtccctgctctcctccctatccaggttggctcgaggccgggaagagtgggagagtgccgccctgcagaatgccaacaccaagtgcaacgggctccttccggtctggggacctcatgtccctgaatcagcttttgccacttgcttggcaaggtgagtgttgagtatttttcatggtggaatggaggggatttgcaggggatgggacaagacccgctatcagcccaatcccctggtgacaccatttcctgttaccttccttgggaatccatgtctgtctgcttgctgactggggagctgtccagagcatacagggtgggggatggaggcttactcaaggggtgacctgacatggcccaccacagggtgggaggaaccagcacccttagcttccagggtaccagatgaaatttctgggtcttcactattcctttgctgatcttatgacagaagatgtggggccaacttggtccttgaggccagaatttctgagttcacttctacagtgtgtggctctgaggtttaaatacgaaagtggcttagtggcaggggggatgttgggctccttagaaggccttcctggtcctaaaaacccagataagaatagctaaagcatctgtgaggtcctcatgtcttgctgatgccttgtggagtggtgccccaccccaagtcctatttcaaagctcagggataaaaagatgcctgtcataaaacaggcagctggcagtgacaatggagagcatgttgaaatgcttaacctctattcttttgttttgagacagggttttgctcttgtcacccaggctggagtgcagtggcgtgatcttggctcactgcagcctccgcctcccaggttaaagcgattctcccgcctcagcctcccaagtagctggaattacaggtgcctgccaccatgcccagctaatttttgtatttttagtagagacggggttttgccatgttggccaggctggtctggaactcctgacctcaggtgatccacctgcctcggcctctcaaagtgctgggattacacgtgtgagccactgtgcccggccaggcatgtattcttgtatacattgtacagatgagatgcagagtttgagcaacttgctcgaggtcacccagttaataagaggcacagcccagatagatgggaatgtgtattgacataggaaaaacaaaagcaaaaacaaaaaacccttttatttggagattgaagagctcattcttatggacaggtcactttgtcagtcagaatggatgagttctacattgcttcctccaaaatgtactccacatgcagccacggtatgtcctacaacattagttcattaagaaatgggcgcccaagagtggtgggctctcatcaaaacttggcgagtgtcacgttcagtcactgcagaaatgaaaacgtcctatggccttgtcgtcctgctggccccagccttggcctcaactttcccttgtattcttgtctccgtttgcaaacctttgcagccatcaggcctgggagtactggaaggaggctctgtctcccaaactgggttttcaccaggaactcacttccatttcattgtttgttctgcttccctctagacacaacacttacctccaggaatgtacaggccagcgggagcccacgtatcagctcaacatccatgacatcaaactgctcttcctgcgcttcgccatggagcagtcgttcagcgcagacactggcgggggcggccgggagagcaacatccacctgatcccgtacatcattcacactgtgctttacgtcctgaacacgtcagtaccctgtgtcccaggggcggcatctcgcagacccaccctgcatccctctgcccgagatcccctcagctttttcatagcctctcatgctagttccggagcaagcgtctggcctaaggcagcctttttgccgaggtggggatgctcatctgcattcttttagggccatgcagaaaaagcaataaagggaacttccttcccccaaactgccctgtctcccaccatgggcagcccaagaccgcatccttggactgacgttcagctcacaggggagcaggaagtgggaaaagtcaggccactgaagcctctacttcgatgcagcggctacttctactttccagactgttctcttgaatggggggaggccacaggtcggagctgtgcccacatcattagtcaagggcatatagattgttacaggtgatggtttcccatcaaggggatgcagcagagctgaggacccagttcataaatggaaaactggatttgttatccctgttttctctacagtgggtaatgcttctggcaagtgtgaagggaaagggaatgttcaagattatctgggaaagtcaaccgacaaggaaggcagccaggaaaaaaaagagattggtagttttatccatatgcacattatgggacagttaggttggtacctggaagtgtaattttaaagaagcacttaggccaggcacggtggctcacgcctgtcatcccagcacttgggaggccaaggtaagaggattgcttgagcccagcctaagcaacatagcaagactctgtcttaatgaaaaaaacaattgttttaaattagccaggctcacacctgtagtcccagctattcgggagactgaggtgagaggatggcttgagccaaggaggttgaggctgcagtgagtcgtgatcacaccactgcactccagcctgtgtgacagagcaagaccatgtctcaaagaaaaaaaaattaggagattgactatcctttagctcttccatttaattcactgtttcatgcttgtaggccccatctcctagcaagaggcttacggttccctgttgaaaggttgtgtacagctcaccccgggtagctgcagcacagtttaggcaacaggacaatctgtctcttgtcttttctagttctttctcttcaacaatgttatcttttccttccctcccatttccttgtgagttaaaaggctgacctcgagaccacaggcttcattgttaaaacacgcaggggcaggttgacatcagagtgcattacatcatctgctgaactgcttagactggcgggagcagcacctggcagcactgatggcgcagaccttcccactgtccaaatttcgctccttctcagtgttcctggggccctggacagagccctgggtgactaggtgtcagtatgtttctgaacaagccagacatttgtaattgtcaggtcccttcattggaaagggaattggctgtctcacagtttctttggtcagccagaggctgacccagaagcttcacagagaggccttgcttctcggcccagactgcttcccagtcgacagctatccaattgacattggtgggagcttggtcacagtggggctgagtgcctttggtggaatatttgtttatggaggcaagtatgtcacagcatggccaccgtaagccagaccagagcctgagcagatcctgcagcagccaacagcctcagattccctacagggctggaagatcaagttgaatgtatccatccatgcccatctgcaggcagcagaagcaggcagggtgtccttgcaccctctcctcctgctttcccagagtccagcatctgtgccagtgccacctatagacctggtaacttttttttcccggttctagtgttgtgtttgtccccacctctccctaccagtgccccatggagttaggatagggcatcaagcattcatggcatgagagcaccattcaggatctaaggagagagtgtacccagaagcgtgtcatcaggaaggacttaagtcacctctcagtgctgattccgtgaccttttgtcaaagcttcagcgtggagaaggaggtagggttaagatggacaggctacctggcttcagaacacagttttttccacgatgtgagacttgggcagaatccttacctcctctgtactgcagttttctgtttctttaaaattgggatagtggtggcactatcccatagcattcttgtgagtactaagtgaaataatcccgtaaagcacttagagcagtgcctggcactgagtctggtgtggtcatcatcatcatcatcattgcaacttaggacgcatgaggacaagaagcagcgctcatctggaagaggctgttctaacgaaggcgggaggatcctagatcagaagaagacaaaccggaagagggagcctaggaaaggaaccacatgcacatttagtgcaaaccatgtaaacataacataacaagactatgtggagcaagggggagtcaggctgtggacccaccagggaatcttgattcatgtttttggccccatcactcactagcttgctgactttgggcaagtcacttcacttttctgggcctctggagttactagcacagttccatgttggggagattgtgaacgtccctgatatatggtgctcaggaaccagtagttgcttggaattgtattagagctggggtaggagctagacatggggccagggaagaagggaagatgccgcgaagaagggcctggaaggggacgaagggcgtggattatcagaggaagtgggagtagtcggcaaggatgggtggggagtgttgagtcatccaagcgttcagcaaatgtcacaagacaacgacaaattgagcaaattcttcctgctcttgctgccgggtcctgcttccaccctgcttttattttatcatgccgcttttcttctagaacccgagcaacttcccgagaagagaagaacctccaaggctttctggaacagcccaaggagaagtgggtggagagtgcctttgaagtggacgggccctactatttcacagtcttggcccttcacatcctgccccctgagcagtggagagccacacgtgtggaaatcttgcggaggctgttggtgacctcgcaggctcgggcagtggctccaggtggagccaccaggtcagtacctgcttccggaagctgctgctcactatttcccatcatcagttttgaaaagctgcttagtggtacgcacgtgctaggtgaaggcatgctttgtgactgcggtggttgacaccagcccttctcccttctcagtctgtcatgtcaagagtctaagctgatggctggcaggttgcctggtcatttctgggttttctgttccgctactagaaaggtagagccagtcttacctactgtagaaaatgttaggaaggcagccaggcacagggtgataaaaccaatgagatgatcagggctaagaacagtaatcaggttttccacatcttgctggtgttggcataagccaggaaagtttcagtgtggccacatggggtattttctaataattaaaaactcgtcttcattctctcttcttggttacattcctatcccatgcgtcccacattccatgaacctttcttcctctagaccactctcctatacgtgtggacacctccccaagaaagagcatgtcagaaaggaagtggtctttgatttatgaccttgggctgtgatttgggacagatggtctcaagagaaacagctggaaactgccaccacagcatctctttgaggacccccatggattgctgtgcgcagaggagaccccatgggtaccactcaggctgccaatggccccacacagtctctacctttcctggggagctacggagcaggctctgggtttggcattttgcttctgtccctcgagtgaaatgtgcctctgcttcatttctggaagatcgggtttgtgatttttgtgattctgctttagcccaggattcgagggatcatgtccacatttgtaggccatccagggagcagagagaaacttttagggccgtgataaagacaagccaagtggaaaatagcctgtgccctcattggcacacctggtgtctttatttccattagccctgattgatcaagcgttgctggtctgtgggcacttcacgctcccagagagaccagattggagctgtcctgttgaatctggcctgtaccagatcatcactggagagtgggagggggcgtcttgttagattcctaggtaacccctgcccccattcctaacatatcactttccagtatttcccaagagcctgaattaatagttaactagctgctggaaatcaaaagttagatcttgagaatactaagttgataagtcaggcttggccagtatccatatgctgcatccacagcaaatagagtggccatttattgggcacagtctctccatggcgggtgtgcaatctgaacccacaggagctgttttgctctcacttaggagactagcattcattattgtcccaggcagttcaggaaaagctgatttggtcacagcttaattaggaaatccagtgtgagctactacattcatgagttgctgttttctctgtagcagtttcgtcacctttactaattggccttaaataattaagttgggcagggtcactcaggatttctgcttaccaaagcacaacagccacagcaaagggccaaatacggccgtggtccggggccgtgagcccggcactcatcaggcagactaggaaaggcactgtgggttagcccgatactgggaggagacccatgggggagagaccgcggctggaagggcgtgtagagatatcatcctgatgctggggcagcctcactggcggcaggctttgtcctaagtcctgtaagtcatggggtaaggggtagtagcagagacacagaaatgtagctcagcagaagctggcctcttctgcacacttgacattcagaaaaaaagttcctctgccaggaacttgcaagtacaaagcctgggacattctcaggcgtctgtcagaacttgatctgttatcttgtctgccagggtaaagagctgcagagaaatggattcttgtcctcatccacgggtccaccttccaggactttaggctgcagcatcatcacacgtatgcgggagagaaagtgggggcttgggaaggtactggggcagagggaggccacaggaagcatatttcagtagagagggaattgtccccatttaatattatttgttttttgcgagttatttattgaatgcaggtgtggatagcctgtctcatgctaggcagccccttcacttgaggcccatatagttttagcttctataatgaataccatctatgtttcttatttttatgattcttatatatacccatgcattttaatactaaacattttaatatatgtccctttagtcatgggatgtgttccagtgtgttttgaggtgtagaatactctgtgacaagggctcacctaggctttacttattacagatgtgatggctgttggcaaacaaaacctccgtagagcttgggtggtagaaactgaatcctgacactgatatttcactgtctgtgccgaggggagcctgatatttctgtgtttcatactggctctacctggtgtaatcattcctcaaacctcaaaccaagaattctgctgagaaggcagtggacattgttagaggcagtctccccctgcctgtcgctccccatattccaaggaactggctggtctttaatcctgaactgaatcattggattaagtagcaacgatactggttagaaacaatggggtgtggtgagcaacttggattatcccaggatttaggtgatgtcagggtggctgcatgctccatcttagacattaccattgcttgataccaacttcctagcagcttgctgccatttaacacagcacatgtttgacaagttaccgtgtttgactggtttaggtctgctggcttttaagaaatttctcctagtgggaatgtaaagactgaattaaaaccttgtttcctacctcatttattaggttccatcaaattccaagagcttgtcggggcccaaacacaagggatacataggaatcctttgcctttctttaagtcactagccttgcatttgccacgtctgccctggcgatgtctcccccggttccattttaccctgatctggaagatgagcactgagagaatcagatgaatttcatggagcatttttgtaaccaataaacttctgggtcccagggctccagaggttcttgcccacagctgcttttttccaagcagaaggctagtcgctggaactccgagatgcatacaccactgtgactcttcccttgctcccagcatgccttgctctgtccttgtgagtatcctcctagggacttcatgtgatggaactggattttcttttccaggctgacagataaggcagtgaaggactattccgcttaccgttcttcccttctcttttgggccctcgtcgatctcatttacaacatgtttaaggtaaggaggctgtcagaggcccagtgggttttggcaagagtgtaaaatgtctgcactcctgtccctgactctgcctcagcacccacatggctgctcctccgctgggcctgggggcgcttttttcctagaaacaaacaaccccaactgtgggagggattgacactggcagcctggagccttgtgtctgtgaggtacatttgttttgtttggttttgtttggtttggtttggtttggtttttttgagacggagttttgttcttgttgcccaggctggagtgcaatggcgtgatctcggctcactgcaacctctgcatcccgggttcaagtgattctcctgcctcagcctcccaagtagctgggattacaggcaggcaccaccacgcccggctaattttgtttttttagtagagatgaggtttaaccatgttggtcaggctggtctgaaactcctgacctcaggtgatccgcctgccttggcctcccaaagtgctgctattacaggcatgggccactgtgcctggcccacatttgtagctgagatcactcctgtcacctgctcccgagcctgctccagactcggctgtgcaggaagaccttccccgccgggtctctctttgctgctcttgccgtgctattgggataagctctgttgccctgagtgagtctgacttaccgcagccagcttataacaggacactcctctccggagagaatctgagtttttgagttggttcctttcatcatcggaatgagacagctcatggaagcacattgacaagtccctttgctctggggaatgcgaatgggaagtgtacggggagggaatgcagccacttgttggagcctgtagcttcaggtgacacagtgcctaataaggagggcctaagaggaatgaagtgaaattgtgtcgttcctggagacaaaacgcacgctctagggtgcctgttggtatgctttggtgtaggttgggagggctgtcctttgaggggttgaaatggcctgactgacttgaggcggaagatgaggcagcagtaagtcacccacctctcttgtctcctgttgattctcgtagaaggtgcctaccagtaacacagagggaggctggtcctgctctctcgctgagtacatccgccacaacgacatgcccatctacgaagctgccgacaaagccctgaaaaccttccaggaggagttcatgccagtggagaccttctcagagttcctcgatgtggccggttagtgtcaaggttttctcttttaaagatcctccgcagcaaagccccatgtcttcctccgtgggtcatccgtagctttatcttcacgaccagaggaaacgcagtatgaaccagcctgtcagctgccactgaaagccctgggaaagatgcgtaaatagcaagtcaccgataacgagaacagcagctctaacatgtactgagcaccccctctttccccgacatgggctgttcactgtatgtgatctcagccctcgaggcagccctatatgaggcaggagctttggttatccccattttatagatggggtaaatgaggctctgaagatcaaataagtggccaagggaacatagctagaaagtgatagcatccctgtttgagtctgttttttaatggcagttcagagaattaacatgcaaattggaatgcccctgtcttcctcctgcgtcttaggtcacagttgaccccagggaggcatgggcgacccagcagggccgctctgaactgtgggtgtgggagacgtggtcagacaattccttatcctactgctagtaaaattgaaattctttgtgtaacaaatttgtcattctaattgcaaacaaacacattagaattggtttgtatttcataaccaagcaccaagtgacagcagggggaggtgacttggcccgtgcctgggaaatccacctagggttaaaagacagtgccctgtgaggttgtgggcgccgcggcattacagcccccatcagagcacccgccctacaaaggtcagctccccagagccaacgcacaggtaaccaaacctgccagctcttttttatgatcttgtttcatttttttatggcattcgttgtgggaattttgtaaagtataaagaagcaggaaaacaaactccccccagatcccactgttaggagaacgcctctgctaacattttctctatcttgttatcctctgggaatgagacccactaaagggctagagtgttgctcagtgtgaattcctctttcttcccagctcagagccagctgaccgattttcccaaacagctctgtgcctccgcattggctgccccttgcagtgtcctcagcggaagctctgtgctgggatggtcttcgtcgacctggtgcctgcctccgcgtctgggcgggcctgtgctaacactgctcacctctgtgtgtttgttaactccaccacctctttacggctcccactggctctgtttcagcctagatgtttcaccagcatcataccttagcacatgcctcgcgttcttcccagaaagtcagccctgggaccaggtgggctggtaaagtcctcagtgctgggccctgtgcctgttgcatgagcctgtgtcactgtgactgtggaagttggagctagtgagaggaggaggaggtgggcagaggaaggagggtcccttgggctcgagctccacatcagccctgagctgctggcaagcacccctggcctgcagccagggagagccagagcctttgccaggcagcgagcctccgtgccttccactcctaggtcaggttttgacagcaccactttattactttgtttaagctgttagaaaatttcagaacatcagacacaccctattcaaatgtgagaacaaaaacaccttccagcagtgcctgcttctggaacaggactcctcctgcggaacagggttttgctcaatgactacctccccggtcatgctgctgtccagtgagcagccgggccagagcttgtcggaccgcagtgtgttctctgctagatgcggcagctgtgactcagggggaatgggggctgtatgcctgctcctgacacacctctgcccgttgtgctttgcaggtcttttatcagaaatcaccgatccagagagcttcctgaaggacctgttgaactcagtcccctgaccaccacacagcagctgcggcggcgaagacgaagctggcttgccttccaccctctgttctccctccttgtgcattaagttccctccgcgggatgctgcattgttaccccgccctcccctctctcatttttcttggtgtggcttggggtttttaggcttcctgttttatctcgtgtgtgtggtgcaccagctatgaggttgtctgtaacccaagccatcaaagggcctgtacatacctaggagccatgagttgtcccggccagcttcatacttgagtgtgcacatcttgagaaataaacaagtgacttaacacacattgaaaaggaa

SEQ ID NO: 13027 - DNA, 7575 bp, Homo sapiens
gacttacgctttggcctgcaggatgtctccaagaagaatgagcgcagcgccctgaatgaagtccatctggtagtaatgagactcctgagtgtcttcatgtcccgcaccaaatctggatccaagtcttccatatgtgaggtatttttgctttgggttcatgggtttggggaaaggtaagcggattgtctgggtagtgctagggccagcacagaggtggtagtcctctgtaagaataaagccattgttccctgaggggagtaagattctaagctgtcaccttttcaagagcagaacctccaccttttcccgaatcccttccaagctctggtctttggtaacaatccctccaatggaggggtaaaagggtttggaagttccattattgaagagcagggctctcttctgcaaggcacagagtggctaagaggattcccctagtgtatgttgctataaggtatggtaataaagcagagagaaagcaatgtgtgtgtggtgaaaggagattagcataaagcagagaaggtagaaattgaggctgaactgcatccaatcttaatgagcttagggagctgtggggtttgctgggatttgcaaggctcttctaatggtcttatttacagtagcttttctccttttttatgcatgtgatcactcacccccaactcctttggaagctggttctatggaagactctacagggggtggggtggggtcgttcagaagtgcctataatggaaagttttctctctccttcttgaattgggcttcttttctagttgctcaagataaaagaggaaacgcgtcccctccagggggaaaggttatttaatccttgcctccctggcttctggcatatgtgcgtgtagcaaggttagagttgagaacagatgtgtttctttgtttgtcttaccatgtggttgttcaaaaaagttctgaaaaacctcacaaacttccttggggaagtttcagtgcaagagcctgattcactcactgccataaaagctaagactgttgtgagtgtgtttcccatccccaacacccacctggatttcacattgtttttacaagccattcttcccatctctgtattttctctgtctcccagtcatcttccctcatctccagtgccacagcagcagctctactgagctctggggctgtggactactgcctgcacgtgctcaaatcactgctggaatattggaagagccaacagaatgacgaggagcctgtggctaccagccagttgctgaaaccacatactacctcctccccacctgacatgagcccattctttctccgccagtatgtgaaggtgagatctttccctcatcaaagaaacactcgtcctttgttcagagcactcttctctttcctcgcggtgcagagagctcaaggggctgagggtgaagagccataggaaggagccggcattccttggtgggggttaatctcggcgtgattgaataaatgaccacttctcccaaccttctgtgggattctcattcctgcctctttgtaaattggaggaattgaatgagatcatggttatctcgtttcacattaagtttagaaaaagatgagaaggtacaagctaatgtcatgagttgtgggtcatgacatgtgtgtcagatattccctgtgctgtcaccactgagaggccctttaacgtacttattaagaagatgggccttctgatcagattgatctgggataagtcccatcttgtgttcttacttaccagtcttgaagcatggagaagttctgtctgtctaacctccctaaccttcagcttctacagctggaaaatgagcatacagatggtatctgctttacagggctgttgtgagcattgaatgaggtgccctttgtaaaggacttagcacaatgcctagcatgtatcaatgcccagtccgtattaactgatatcaccagtctcttcctcactgccccctcagaatagctttgagtagggtaggaatacgataggcatagagtgtggatctgatcgttgtcttgctcttttttcatgactctttggtggttttccataacttacaggccaaagagttctggaggacccagccacctgcttgactctagctttgtcacctataacaccctacacgcagccctgccagcctgcacatttcccaaggtgtggcgtgttgcctttgttcatgctgtcccttctggaattctttcctctccctctgctcccctttcttctcctgtctagcgaattcctagcccatcttcaagatccagcacgagctttggatccttgggaaaacttccctaacatatactccctgccatcaagtctgctcaagagagccttgtcctgggttcccggagcaccctgtgtgctccttcacctgtcttcccctctacactctcagcagaaaccatattttattcctgtttacaactccagtgcttgatacagaactgatgaataactgggagttgaatatgtgagacacgttgtgccctcaaactcttacagattctttttatgggaccacacagcttgcaggatagctgttgtttccactgtcctcacatctctcatttacctctgcctttttgtgttacatgaagccaggaatcttggctgagtttagtgatcttgcccaccttggtttatttaacaatttcttgttatcatgggaaattttggttctagggatagaatacatctcatagaagtcagagatccttactccctttttcttttttttttccaatttttttggcctttctagcactcatctttatgtaggcagagtacaatcaacccaatgtcaaaaaccatagagtgaaatattaggacttttaggaagtgaggtctgcctccactgtaacctttgcatgtaattaaattggccgcagaagcctgggccttctgggtttatagaataaactgtcagtcagtcttgattccagctctgaaaggcaccctttaccacctccaacatgtaatacgtctaatgagccaggctttttcctaattgtggtcatggaaaatcgatagtcacaggttctcatgcaaattttcttctcccagggtcatgctgctgatgtgtttgaggcctatactcagcttctaacagaaatggtactgaggcttccttaccaaatcaaaaagattactgacaccaattctcgaatcccacctcctgtctttgaccactcgtggttttactttctctccgaggtaagtgaaagtcccaagctgcatgcttgttgggctgaggacacatctgcattcacctctgtgggcccctttcttcctcatccttacttggtatttccccttgcagagtccctttcacctttgtaggtcttggtcttgcccttctggaacatactgtgtggtagaactgtgggagatgtgtatcaaacaagccatactttaccttctgattctgtgtgttgaacttcgcctcacgtgctgataatgggcaagtttaataatttaggttctgtcagaaaaacaaagtatactagttatcttaatagagagatttcaatatgggaaattgggtaaatgctgttggacaacaaaaaagataaaaaggaaacatgaggtaacacagggatagtaactgcctgaagcagttatcaggaagtgggttccctgaggggatgtgatgcggttgatgctgggagcagtgagagaagctgatgattagaactcactgtggctgccagggtgcagggctgttgctaggactgcaggcagatgggaagaagcaagccccttcttcctcctgctgccagtgtccctccctgttggcagaacctaagagggagccagctggcaaagaagtagtgcattggcataattctggcctcagcatcactgggcagtgtcagtaggggtgggttgggaactgagagacaatggctttaataaccttagtaaccagacagcaaccctgagatagattaactctgggaagaataatctgttagcaaacctcagatgaggattttgagttacatagttgtaccaacccaatcttctctttagctcttttacctgaaaaagagatttggaatggtttttttcttgatagtttccctttgggtgggctgaagtggagtccagcttgcctgtagattcctaagggcacaaggaagagatgcatgaatattggtattttcctctttgatttctttctctccctttctttctcctggtctcattaaaggatatttaagtttaagagaggctggtttggtcaagaggaaatagcttggtttgtgtttctccccagcctttgtttttttttttttttttaagaccaagtctcactctgttgacccaggttggagtgcagtgacacgatctctgctcactgcaacctccgccctctgggttcaagcaattcttctgcctcagcctccctagtagctgggattacaggcagtgctaccacggccagctaatttttgtattgttggtagagatggggtttcaccatgttggccaggctggtctcaaattcctgacctcaagtgatcagcccacctcggcattccaaagtgctgggattacagctgtgagccaccgtgcccggcctgtccccagcttttaataacagtttattaaaacccagggtgtgagagccacagttgatatagatacagtcccagagtcatttactctttgtggtgtttttcttctcaagtacctcatgatccagcagactccatttgtgcgccgtcaagtccgcaaacttctgctcttcatctgtggatccaaagagaagtaccgccagctccgggatttgcacaccctggactctcacgtgcgtgggatcaagaagctgctagaagagcaggggatattcctccgggcaagtgtggttacagccagctcaggctccgccttgcaatatgacacactcatcagcctggtacgagggctgggacctggtagggcagggaggggggatgtgataaggcttagccaagtaggtaatagggctggaggtaataatgcaggacttttaactgtgttgacaatggcatggttagggctgagatgagggtaaatccataacccctgtctgggtgctgtaccatgtgtagttggcttcaggatctgggatgtccccctcagcactctcatcccacctggcagcagttcctccactgtgaggtgagtggcccgagcttcttaccagtgccatttgcttacatcctagtcaggactgatctctttgtgcacctctggtttttacccttgaatactaaagaaatgatgaaggttcgagtagaaaaatgtattgctgcctaaagagaaactgtttggacttagaggagtaaactgagtattttgtatgtgaacaacctagaaagaacgtctttaatctagctggctcatgttcttgcttatcgttatatatcaagaaaagtaaactggattatagtttcttaggtcatggtctaccttttgctgttgccttattgagtagtctgaaggttcctgaaaacagcgccttgcgtggggatggggtagaacaaaggcaggttcggtaagagctgcagcggttgcagcagtgtgtgggtcatggtcccaggttgaccagacatctcagcaagcatctgccttgctcagaagatcatgttcaggtgtagtccaaagtcagggagatggctccaggcagcaggtgtggtgcttgtctgggcaatgtggtggagttactcctttcccgtggttggttcctatttcagatggagcacctgaaagcctgtgcagagattgccgcccagcgaaccatcaactggcagaaattctgcatcaaagatgactgtaagcaatgctgctccttttgattgctgttattcattcattcaggaactgttaaggcctactatatgccaagcactgaactggatgctggagatatagctgtgaacaagatagactagacagaactctgtctagcaaagaagacaagtaaaaatctaaaagagtggtgagggctggtcgtcaaagtttggggagctgtagaagcacaaagtaggagtctctgacctccaggtagtggcagtaaagtcaaagaggagtaggtggagtctagagaaccccttattcaaaggagcagggggctctggtcggtgtgtagttaaaatacttttcagagatttccacagaaagtataacttcttcacaatgtccagcagagagaacatggcaaagaaagctggtgagaacagggcagtctcagctgtagggagacgttgttttggttctcctgagtctggttgaggtcgtctcagaggtgagcctctgtctcctctgcttgcagccgtcctgtacttcctcctccaagtcagtttccttgtggatgagggcgtgtccccagtgctgctgcaactgctctcctgtgctctgtgcggcagcaaggtgctcgctgcactggcagcctcttcgggatcctccagtgcttcttcctcctcagcccctgtggctgccagttctggacaagccacaacacagtccaagtcttccactaaaaagagcaagaaagaagaaaaagaaaaggagaaagatggtaagggtcaccctcttgtcattgtgactacaatgatgtatgtaaatctctcttggagcacatggtttgtcctgttgtaaaaggtcttttaatcctgatttagaggggacttaaagcccaaatgttctctagtgtctacttttggtctcattttcaattatactgaagtgacaccttaaacagcatgacttctcataccaagtgacagtaataagaaaagtcaaagtgcactgaacatttttagtagaccaaatttcttattctgtgaaataataacaccttctctatggagctcccatcagagttcagtgaaatgacactgagtacattggtaaatgctcagtaaatgttagctctcttagctgaccctcaccatcagctgcactgctttccatggtccttggagacctgagatcagtggtcagggttgagagccatggtggtggttcacattcccccagttaatgatcagacatctctgtgtaggcctattgcaagcccttgaaaggaagttcctcctcctccagtgtcactgtatttgttcagtgccagcttacatagcactttatcctgtggtttttagtgtcattattgtatgtcttgtctggaaggcagctgtgctcaccactgcatcaccaacgttacacatatgtctcatttggggctgacctatttgtcccccagtaaacaactaaaaattgttttgcagaatatcagcattcagtagaaacttttagaaatggacagaattccctccctcaccatttggtagcccaggccttaggaccctggaggacttcttcctactcttcagcccttagtcctgtcctaatcttgcaggtgagacctctggcagccaggaggaccagctgtgcacagctctggtgaaccagctgaacaaatttgccgataaggaaaccctgatccagttcctgcgttgtttcctgttagagtccaattcttcctcggtgcgctggcaggcccactgtctgacactgcacat

SEQ ID NO: 13028 - DNA, 1656 bp, Homo sapiens
ctttgcgggccactcggccaactgacgtcggcctctcctgtctggatgtccagtttctgtggctcactcctcaagccagatcatctgggactgagggtggcctctgggctcctgtagacttccacagccaggatttcacatccctccccagagcctcggaccgaacagccacaagcagccatgagtgtcgtgcctggactaagctggagagacaaaggcgtttgtggcaagggcccagctggaagccctggcaggccagagcatgcatgtgctggcttgcacgagcatactttggtgtttgtgttggggacaccgggcttctgagggactggcgtggctccagggtggggagcagcctggttgaagcgcggccaggcactcactctgttgttcagatcccagctccactgcctgctgtgtccacagtctcctcacctgtcaaatgggaatatctatgtggcgggagggtgctgaggtttccacgagctaatctgcctgctgtgtagtaactagtagcttttcttactgttagtgaacttgttttagtctgaaggaaggcacccatgccccaggtgaagtccagctgagttcagtgaggacgatggagacccttggtcttggcacccttctgccttatactgggaatgcctcaggcttgctcctgctgtgtgtctgtggttgcccactttctgctggtctccgagagactgattcaggtgttcaggagtctgttcgctattacatcacctccttgtgagaaataaagtggagcagcctcatccagacagcaaagcaaggagggagcgtgaggagcagccaggtgagctggtggcatggggccgcctgtgcagaggccggcctcgctgcttcatgtggctcagggaggctcagcacgtccgtcatcacacctcagggcagcgagagtggacctggtgccttcagaagcccacccgaggcctgctgctctggcctgcaaaggtggagtcaccaaagctcattacaaagtgtttgcttatttttgtctgccctgcatttttttatttcttgcaaaggcctcagaggatgtgggccccagcccaaacacatcttgttttcactagtagagcttttcctagtgtctgcacaggggtgcttccagtggctctgccatagccccagacaagctgctgacacggcagccatgaggtctgggacaggttccagggggtgcttttggcctgctccagcaggagtggaggctggactggtctccagcaggagtggaggctggactggtctccagcaggagtggaggctggtctgggctccagcaggagtggaggctggtctgggctccaggagtggaggctggtctgggctccagcaggagtggaggctggtctggggagagagctacacctccccaggcccaggtctcacgaaaggagcatcgaagggcaccgaggaaaaagccacttagccctctcctgtcctgcaccattatctgggcccattggttcttgggtccctgtctttctcaacaggcagccccagttggggaattaagttgattctggactggctatgcctaatgatagctgcaatttgaaacccataaagttcgagttcagcaataaagttggggaggcagtgtcaacaccttccttgtagaacggc

SEQ ID NO: 13029 - DNA, 14328 bp, Homo sapiens
ttaggttattggagtgatgagtaaagaatacataccaaagggcacacgttttggacccctaataggtgaaatctacaccaatgacacagttcctaagaacgccaacaggaaatatttttggagggtaagtaagggaaatttcttcagacccattaaatgttaggaaaaaatggagctaaaagagctgggtggctcacctttctcatcctgtgctgagaaatgctggggctcacccataagtatccagcatccccatggacacagggaattctgaacaaatgtgatgaaaccgatgaaatgtctggcctgtaggtggttagtgatggagatacgggctatatgtgaatcttgatttttgcaattcattagagctttgtaatgaaaggaaacagtttgttgcttgctttaaggataggttcatttgcatttctccgcaaggaagtagtaatgagttaccaagccttagatttcacccctttttgatttcttgctgacttaactttaattgaatggaagagttatcacaaatgaattatctttttggtttttttttttttgagatggagtctcactctgtcaccaggctggagtgcaatggcatgatctcggctcactgcaacctccgcctcccaggttcaagcaattgtcctgcctcagcctcccgagtagctgggactaaggtgcgcgccaccatgcccagttaatttttgtatttttagtagagacggggttccactatgttggccatgatggtctcgatctctggacctcgtgatccgcccaccttggcctcccaaagtgctggaattacaggcaagagccaccgcgcccagccaggaatgacaaatgaattaccttataagtaaatgccattaaggaaggatagctggaagatgggttgaggggaatggaggaccacagaactagtcctatttaaatacatgtgcatggtaaaatgattccatttgacaataggttaattatctcatagcataaggaaaatgcttaacagtcatatgcaagatgataagctttcctatagcatccaaccaaaagatctagccagtacaatttcctttgctatattagggttagaaaggcccccagaggtgaaccaattagatggaatccttgaataaaacactggattagcagtgaacagaaaaaagtcagattgctttccttcttcccatagatgtctcagggatatttagtttcctcagaagataaagaatttagtaagcgtttttttgtgcatacttacatgaaatgtacattatttgaattctttaaaaagaaacagctgcatgataacaaaaattgtgttatgcttgctttagctggtatttttgcctagaacgattatatcgttcggacaagaagctattcctaagaaacaatatttttaatccaggaagtttttcatttttagaaatttatcttactatttcccaagcaaaagagggtagttacagattcactaagaatcatgtgctcacaatttttatttaataattattcctccttaaaatatattaatcacctgacttacaatggtggaaccatgagtgcatttttgcctttattgtcaataacgtcttctcagaagtgagccacaaaggtgcatagttcttggagttaaaggtctgaattaagacaatccagcataagtctcattaatgtgtgattattttgagaaaaggcaagaagtacctaagaatctccccctcactgtccagttccctgtttcatttaaagattcactgtaagtaactgaaaggctttccttgggaggatttatttgaatcagtctttcacatgcaaaggatattgtagaacatctcgtttttgctggcaggaatatgaacatctgttgtgaggaaagaaaaagtttcatgcaaattacactgccaaagaagggatgttcaagttgagaaaccagtgacatttcttgtaactgtactatgaatcagcgcattttaatcttctagataatatatggaagtgcaggaaggtggtaggaaacggtgttcattttacatatgcgttattttattctgtgtgagtgacttcatggcaccgacattgctgtttttaaatgaggatacagtaaattgcagtccgaggaaggctaactggaatcaacatacccgtagctttagaaagcagtttccgcaccagcgaagagtacaagagcgatggaaccccatgttcctggaagtttgcacatcagagtaaacaaacttgaaaacccctcttgatagcagaattcacccagccttgttccattttctcttaacaaaacacaccgcaaaagctctcacaagctgctttgatgaagccacatgtatttcccccttcacaatttacaggaagttactcttaaaagaaagtgattctggtgtttaccgcctgtgttaaagggacagagttcctttttatttctgataacgtttgagcgaaatacagaaactatctgtagactagcatagtcggtacgtgagtaaggaaaagcaataacctgctgtccggtgagcacaaaattcctgctacgaacagtgccttactgctgcttggagactgcaagtcgcagatcacactaggtattgactgattgtataaggaaatttcttaaagtctaaagtaaaggtggtacctcctaaaaagaggggaagagagaaaactttgtgtggaaggataaggagtgtgtttatagtttcagtaagagtgtacgttttaatttttcttcttcctctgcctctttgccaagtagcctgagtgcatctgttatccagaagtagtattactctaggacaaacttcaaattcttcattctgcgttgcctttaaggaacaacatactttcttcctgttctttttccaaaaacacacgcctatggctctgtgtgtggtgttttagccagcctcctcccagataaggggttcccttccctcctttgcattgaaaggaaagtgcaagtctggacatgtttatcaagaggaaaagtgacttctcagtaatagactgtcaaattcgggctgctgcccgagtgttcgctttgttatggcaggtgaagttcacctttgccccacccagtgtttccacaaaaaggcaaggttccaagtattcatatgaacaagtgttactttaggacttggagggttgggggtggaggatgtttgcatagttgaagccttgggcgggggtgtaggaaacggcgagtacagaggccatagaaaaagctaagactcagtttgacgtcgtcagccggcttggtcttctacccagtgactcaaagcactaaaagtcagcataatcggaactgaagtcagtagcatcgcccatttgccattcactgcagtagcaaaagtagtactctgtggtgggttaatcggtttgaggcagctccttaaatgaacatttgtgtttcatttttctgttattttcccgaacatgaaaagacgataaaactgaaatggaaaaggtaactgacaaaagtgtgccttacctgtttccgccctgatttctgctgattcaagactattctggctaaactgattggattctttttctaactaggcagtaggggatcagaaatcacacacggtaccggctgtgtttattctgagaggtgctggggagctttgggtctgacttccttttacatgcctgtcttctcttttggacagatctattccagaggggagcttcaccacttcattgacggctttaatgaagagaaaagcaactggatgcgctatgtgaatccagcacactctccccgggagcaaaacctggctgcgtgtcagaacgggatgaacatctacttctacaccattaagcccatccctgccaaccaggaacttcttgtgtggtattgtcgggactttgcagaaaggcttcactacccttatcccggagagctgacaatgatgaatctcagtaagtggattacagaacaaaaaaataaaaaatgccagtaatgtcggttctgcccctttgaactaataacatgttgtttaattatacggctttgtcatgtgttggatgaagtaggtggcttaagctagggactaggaagaggaaaaacattttttgagtccctattaactattaggaaacttgatcatttaaaagtatatatatatatgaggagctaccttgagttttgaattcaggatgttacaggaagaaatatatgtccaattctaatttatccaaaagcagttgggagaattacagggattggtccagacatgctgcgtatgcaaggtatagccctcatctgtggtactttggcagggcttagactgcatcaaaatatttatagatgtacatttgagtgtacagttaggatctgatgtggaacattgtaagatcattgctagaaaaactttgtcataatttttcaatattattctaagtgaataaccgtaaagattttacatcttagcttccttccttacagtaaaaaaactatctgatctcttgatcagtattatagtagccacctatcactttatcttaacaaattctcaattccttaggtttatgtgcttttacttcttttatttgattaaaattgctgtcatgacctctctctgcagagggctgcatcattttggtcattctcaagtgatctctttgagcaatttaagaattgccataagattctaacctctgctgtaactatggttgtgtgttcttggttagaccactaaatcttattagcagttttaaaaattattccttttggtttagaagttaagactaaatgctgaagtttttgtaacttttggttttgatatcatttcaaacttaagaaaacatttgaagaaaaggacaaagaatttccacttaccctttacccaggtttaccagttattgataagtatatccatttgctttaccagaaggctaacttgttttagttctcattttcacctttgagacatttggaataaatatcaatgttaacataaattggaattttgactttgattttaggaccaatgaacaagccaagtacttaccctagtcatatataatccaactgtatggttatttggtattcattccacacttcattttacttgatctcccttaagattgcaagattgtgtttgcagtttttctgaaaatctggggctataaaagcatcaggacctcccccgtaggggaggtcgtgtgtttggggtccttacacaacaggttacccttgagcttcaggaaaagaactggctctcagttccccagttccagcttaatgggtctaattaggtcctgaccaaaaaggtggcagttcttttccctcatgtctcttcagcgctccccgagactctggagactctgtcatatccctagggctgagcctcccaggaaccattcggctgttgtggcatctgtgtatgccatgcccagtgctgaggacctagtaacaaacgacaaatgcacaggcacagtggcatttttgtggaactcgtattccagctgtgcgtctcagaagaagcgcacagctccctcctggctttcttaacatagtgagccacttccacttaagggtctccttacattccttgagtttaatcattcatggattcagaggaaagtcttttgatttttgcttttctttaaacagttcatttgaggtgacctaccccagtgactttgcaccaaccaccaagaaacttttttgcatgcttcccgcaccctgtgccaatcaagggaagggtttaaaggcctggcgtttttattcctcaaagaaaggttttgcacagtattttaaggttcaagtgcttctactttgtgttcagaagcaactgtcatatatactgtgaaatgacaccttttatttatccctttttatttatgcagtatgtccccttttattttggcagaattttttctaaatggtggtttaacattttcaagcacatttcattgtccaatattcatagtaaagaatgagagttaacaataaccagtcacattaaaacaagattcctgctgccagttgtgaaaccggttgtcttaggcgtggcagctgatgattgagactgtgatcaggaaaatttccactatttcatcaggcctaataggtagattgtgtctccaaatgaactgtgttgggtttccatgcttaaagcacaatagaggtggtgcaagaatctccatgagggcttaaatggcagtgatggttcaggcggtagagtttggagaagaagggatttgaaacaaaccaaaggaaagaaaagtaagtagccagaaatcacaaaatggcatttttctaaaaacaaaggaaaaggaataaaagaactaataagtttgaaacccctacccctcccaaatttggcagggggggaggtattttttttctatctatctaactaacccatctagaaaacagttgaccaaattatagacttctaaatgttaatctgctttctcagtttcagttgaaaagagactttgttttgcctactgcagaacttctaggttctttcttatagtcttggggttcttattatagatcgaaaatgtgagtcggcataattaagccattcggagtcttcagaagcagttcactcttgaaatgactccgtccgcctacagccatttaagatttcagaacaaaaacagatcttgattttctttttcatgttaactcaagctgttgctgagtgggagagtcagaaatgacaccagctccactgattactcagctgctgaaggatgattttttaaaatgcacctttactgtatatggacttcctaatttccacctgtagagcatcttagggaggctaacatgtcactctggatgttcttttagaataagatgcaaatctatttttctgaaggcattagagatagcaaacatttattgtgagtttactatatactaggcactgtgctaagtgttttgcatagaaagtttaaaattctggcttttttgttggcccaatcataagtttcatatcagttcaacattcaaattatattaaggtacttaagaagaatccctggctaaatgtgaggggcagtgccacagatggactgaaactttatgcttattgcacatttatgctattattatttgttgaattatagaaccaagggagtgtggaagccactggaaaaaatatgagacttagatacataatttgagtaaaaatggctcaaagtcatgagggtaaagttttttgtatttccattttattcgagcggcatcgtttttaaaaatcattatgaatttgaccctatatagatgtttccaaataattctttttcaccttcataaaattccttcctgtggctgtgagatgccttgcctatcagttttcaagcttagttgtctttctcatcctttaccattttagctttaaaaaacaaaagtgacaattagaacttcctgcctgctgggcctcactgaaagaccgatattggcctgataaggagatatttattttgttttagtggcttcagaaatccctctccctcagcaagctttccatcacggcccccccgtcagcatcttccctgatagcgttcttctctgtgtttattctggggcttcaggctcgcccaggaggaactgataaccgctggcaggagataacattctctaaggggctctcaaattggaatcgaatccctcaagccagtcagcctagagaatacatttaaagggttcagttctggagtttcacagagttcatttctagacctatcagatagcaagtgtggagttctttctcaactaaattcaagcagagacattttttagacgatgaaggatatttgcacaaaggcttcagcatgatcccccaaacctgctgcctctgaaggcatctccacacattgacagccaatgccttcagtgcgttcctagggcaggtgtcctggcttgagtgactgtcctccaataatcagagctcaaactaaacatcgtatgttttacttttggtttccaggcaaggctgagcagggaattttcagttttccctgcccagatgggtgttttttcctgaaggcatcatttattgtgtagcgaggagacagggctggctgtggcagggatagtctagaactgtcctcattgctgctgttcctaaatagtatctttaccaagtaataacgtgccgtctttgggaataagtgctttcctcttagcctgttctgttttcttgggtgcgctaagtaattgaactggctcaggaagtacctattgtggtttggcagaggtgactgtcacgccttgtgactccaggggccagcactgctgggatcctggctagaccagacagagccttggtgaagtgcttaggctgtctgcacatcgcgaggaaggtggtattcacttcgctaagctccttggcataggcagtttgaacagggctttatcaaattcgtattcaacaagagtagaagcgaaaattgatgactgtgtattacttgaaatgagtcttaatctttcacatttagttctcagggtatgctgatttcctttaggtaaaccatgaacatcagaaagacttttattaacctatgacagggtccccaccccagtatttttccactccattaaaatggaagttttttttttttttttcttttttgagacagagttttgctcttgttgcccagtctggagtgcaatggcacaatctcggctcaccacaacctccacctcccagattcaagcgattcttctgcctcagcctcccaagtagctgggattacaggtgtgcgccaccacgcccagctaattttgtatttttagtagagatggggtttctccatgttggtcaggctggtctcgaacttccgacctcaggtgatccgcccacctcggcctcccaaagtgctgggattacaggcaagagccactgcatccagcttaggctatcttactccagcctaaacagcaattttctatcataaggtctgtactaatgaaaacagaatcacccaaggctgctgtttgttctgtctgtgctgccattgtccgcattttgctgaggaggaaacggaactgcacttttgagtgagtggcccagagccttctagaatgagagtgcgttggaagccagatatgtggcgattgtgtcgccagctgttactcaggttttctcaagaaggaggagcaactttggcagttttgcttcagttctctctagccctctgtgtaatcgcccctttttctttatttcagcacaaacacagagcagtctaaagcaaccgagcactgagaaaaatgaactctgcccaaagaatgtcccaaagagagagtacagcgtgaaagaaatcctaaaattggactccaacccctccaaaggaaaggacctctaccgttctaacatttcacccctcacatcagaaaaggacctcgatgactttagaagacgtgggagccccgaaatgcccttctaccctcgggtcgtttaccccatccgggcccctctgccagaagactttttgaaagcttccctggcctacgggatcgagagacccacgtacatcactcgctcccccattccatcctccaccactccaagcccctctgcaagaagcagccccgaccaaagcctcaagagctccagccctcacagcagccctgggaatacggtgtcccctgtgggccccggctctcaagagcaccgggactcctacgcttacttgaacgcgtcctacggcacggaaggtttgggctcctaccctggctacgcacccctgccccacctcccgccagctttcatcccctcgtacaacgctcactaccccaagttcctcttgcccccctacggcatgaattgtaatggcctgagcgctgtgagcagcatgaatggcatcaacaactttggcctcttcccgaggctgtgccctgtctacagcaatctcctcggtgggggcagcctgccccaccccatgctcaaccccacttctctcccgagctcgctgccctcagatggagcccggaggttgctccagccggagcatcccagggaggtgcttgtcccggcgccccacagtgccttctcctttaccggggccgccgccagcatgaaggacaaggcctgtagccccacaagcgggtctcccacggcgggaacagccgccacggcagaacatgtggtgcagcccaaagctacctcagcagcgatggcagcccccagcagcgacgaagccatgaatctcattaaaaacaaaagaaacatgaccggctacaagacccttccctacccgctgaagaagcagaacggcaagatcaagtacgaatgcaacgtttgcgccaagactttcggccagctctccaatctgaaggtaggccttgagagagagcagtccaaggggctgtgagtgcatgcttgtgtttgtatttagcttgctttccatggggtatcgattgcatttgcagtagtatgagcccccggttggggatagtgggtatggattccgcctggcttttgccacttctagctctttgactttggacaagtgacttcccttctcctgattttcttctgaataataaaaaaattaggggtttggactagaagattaggtgaaactccctgctagcctgtgatttttgtgcttttaagaaaaacaccattctgaaaacatgaagatttcttctttttaagactgtcttgatgcttttcttaagatatttgcatcaacacttgagtcttggagcagaaatgttaggtctcagagccagcttgagagcagagctaacacatgtggcttcttcccaggtccacctgagagtgcacagtggagaacggcctttcaaatgtcagacttgcaacaagggctttactcagctcgcccacctgcagaaacactacctggtacacacgggagaaaagccacatgaatgccaggtgcgcagtattttctgggtagaccttctgacctttgtagaaaatgtctgtgagtcaccctcccatgtcctatatagcccgtagttaaagccaacaccagattctgcgttgtcccatcctggactgatggcactatggtccttcccagtactttgtatctgctgatgacttgagatggcacagccagcttccagtgggtgggaaaatggtaggggaaataaacagcccctcgtgtgctgtgtgcccacatccccccgtttgcttaataccacactggaggtgccacaaggaggcttctcacctcctaggttgctgggcgttggccggtaagcctgcccctcccgttggcaactcttaatcttctggccttcctgtctcccttccctgctgtctctctcccctacactgtaggtctgccacaagagatttagcagcaccagcaatctcaagacccacctgcgactccattctggagagaaaccataccaatgcaaggtgtgccctgccaagttcacccagtttgtgcacctgaaactgcacaagcgtctgcacacccgggagcggccccacaagtgctcccagtgccacaagaactacatccatctctgtagcctcaaggttcacctgaaagggaactgcgctgcggccccggcgcctgggctgcccttggaagatctgacccgaatcaatgaagaaatcgagaagtttgacatcagtgacaatgctgaccggctcgaggacgtggaggatgacatcagtgtgatctctgtagtggagaaggaaattctggccgtggtcagaaaagagaaagaagaaactggcctgaaagtgtctttgcaaagaaacatggggaatggactcctctcctcagggtgcagcctttatgagtcatcagatctacccctcatgaagttgcctcccagcaacccactacctctggtacctgtaaaggtcaaacaagaaacagttgaaccaatggatccttaagattttcagaaaacacttattttgtttcttaagttatgacttggtgagtcagggtgcctgtaggaagtggcttgtacataatcccagctctgcaaagctctctcgacagcaaatggtttcccctcacctctggaattaaagaaggaactccaaagttactgaaatctcagggcatgaacaaggcaaaggccatatatatatatatatatatatctgtatacatattatatatacttatttacacctgtgtctatatatttgcccctgtgtattttgaatatttgtgtggacatgtttgcatagccttcccattactaagactattacctagtcataattattttttcaatgataatccttcataatttattatacaatttatcattcagaaagcaataattaaaaaagtttacaatgactggaaagattccttgtaatttgagtataaatgtatttttgtcttgtggccattctttgtagataatttctgcacatctgtataagtacctaagatttagttaaacaaatatatgacttcagtcaacctctctctctaataatggtttgaaaatgaggtttgggtaattgccaatgttggacagttgatgtgttcattcctgggatcctatcatttgaacagcattgtacataacttgggggtatgtgtgcaggattacccaagaataacttaagtagaagaaacaagaaagggaatcttgtatatttttgttgatagttcatgtttttcccccagccacaattttaccggaagggtgacaggaaggctttaccaacctgtctctccctccaaaagagcagaatcctcccaccgccctgccctccccaccgagtcctgtggccattcagagcggccacatgacttttgcatccattgtattatcagaaaatgtgaagaagaaaaaaatgccatgttttaaaaccactgcgaaaatttccccaaagcataggtggctttgtgtgtgtgcgatttgggggcttgagtctgggtggtgttttgttgttggtttttgttgctttttttttttttttttttttaatgtcaaaattgcacaaacatggtgctctaccaggaaggattcgaggtagataggctcaggccacactttaaaaacaaacacacaaacaacaaaaaacgggtattctagtcatcttggggtaaaagcgggtaatgaacattcctatccccaacacatcaattgtattttttctgtaaaactcagattttcctcagtatttgtgtttttacattttatggttaatttaatggaagatgaaagggcattgcaaagttgttcaacaacagttacctcattgagtgtgtccagtagtgcaggaaatgatgtcttatctaatgatttgcttctctagaggagaaaccgagtaaatgtgctccagcaagatagactttgtgttattctatcttttattctgctaagcccaaagattacatgttggtgttcaaagtgtagcaaaaaatgatgtatatttataaatctatttataccactatatcatatgtatatatatttataaccacttaaattgtgagccaagccatgtaaaagatctactttttctaagggcaaaaaaaaaaaaaaaaaaaaaagaacactcctttctgagactttgcttaatacttggtgacctcacaatcacgtcggtatgattgggcacccttgcctactgtaagagaccctaaaaccttggtgcagtggtggggaccacaaaacaaccagggaggaagagatacatcattttttagtattaaggaccatctaagacagctctattttttttttgccactttatgattatgtggtcacacccaagtcacagaaataaaaaactgactttaccgctgcaatttttctgttttcctccttactaaatactgatacattactccaatctattttataattatatttgacattttgttcacatcaactaatgttcacctgtagaagagaacaaatttcgaataatccagggaaacccaagagccttactggtcttctgtaacttccaagactgacagctttttatgtatcagtgtttgataaacacagtccttaactgaaggtaaaccaaagcatcacgttgacattagaccaaatacttttgattcccaactactcgtttgttctttttctccttttgtgctttcccatagtgagaatttttataaagacttcttgcttctctcaccatccatccttctcttttctgcctcttacatgtgaatgttgagcccacaatcaacagtggttttattttttcctctactcaaagttaaaactgaccaaagttactggctttttactttgctagaacaacaaactatcttatgtttacatactggtttacaatgttatttatgtgcaaattgtcaaaatgtaaattaaatataaatgttcatgctttaccaaaa

SEQ ID NO: 13030 - DNA, 14328 bp, Homo sapiens
ttaggttattggagtgatgagtaaagaatacataccaaagggcacacgttttggacccctaataggtgaaatctacaccaatgacacagttcctaagaacgccaacaggaaatatttttggagggtaagtaagggaaatttcttcagacccattaaatgttaggaaaaaatggagctaaaagagctgggtggctcacctttctcatcctgtgctgagaaatgctggggctcacccataagtatccagcatccccatggacacagggaattctgaacaaatgtgatgaaaccgatgaaatgtctggcctgtaggtggttagtgatggagatacgggctatatgtgaatcttgatttttgcaattcattagagctttgtaatgaaaggaaacagtttgttgcttgctttaaggataggttcatttgcatttctccgcaaggaagtagtaatgagttaccaagccttagatttcacccctttttgatttcttgctgacttaactttaattgaatggaagagttatcacaaatgaattatctttttggtttttttttttttgagatggagtctcactctgtcaccaggctggagtgcaatggcatgatctcggctcactgcaacctccgcctcccaggttcaagcaattgtcctgcctcagcctcccgagtagctgggactaaggtgcgcgccaccatgcccagttaatttttgtatttttagtagagacggggttccactatgttggccatgatggtctcgatctctggacctcgtgatccgcccaccttggcctcccaaagtgctggaattacaggcaagagccaccgcgcccagccaggaatgacaaatgaattaccttataagtaaatgccattaaggaaggatagctggaagatgggttgaggggaatggaggaccacagaactagtcctatttaaatacatgtgcatggtaaaatgattccatttgacaataggttaattatctcatagcataaggaaaatgcttaacagtcatatgcaagatgataagctttcctatagcatccaaccaaaagatctagccagtacaatttcctttgctatattagggttagaaaggcccccagaggtgaaccaattagatggaatccttgaataaaacactggattagcagtgaacagaaaaaagtcagattgctttccttcttcccatagatgtctcagggatatttagtttcctcagaagataaagaatttagtaagcgtttttttgtgcatacttacatgaaatgtacattatttgaattctttaaaaagaaacagctgcatgataacaaaaattgtgttatgcttgctttagctggtatttttgcctagaacgattatatcgttcggacaagaagctattcctaagaaacaatatttttaatccaggaagtttttcatttttagaaatttatcttactatttcccaagcaaaagagggtagttacagattcactaagaatcatgtgctcacaatttttatttaataattattcctccttaaaatatattaatcacctgacttacaatggtggaaccatgagtgcatttttgcctttattgtcaataacgtcttctcagaagtgagccacaaaggtgcatagttcttggagttaaaggtctgaattaagacaatccagcataagtctcattaatgtgtgattattttgagaaaaggcaagaagtacctaagaatctccccctcactgtccagttccctgtttcatttaaagattcactgtaagtaactgaaaggctttccttgggaggatttatttgaatcagtctttcacatgcaaaggatattgtagaacatctcgtttttgctggcaggaatatgaacatctgttgtgaggaaagaaaaagtttcatgcaaattacactgccaaagaagggatgttcaagttgagaaaccagtgacatttcttgtaactgtactatgaatcagcgcattttaatcttctagataatatatggaagtgcaggaaggtggtaggaaacggtgttcattttacatatgcgttattttattctgtgtgagtgacttcatggcaccgacattgctgtttttaaatgaggatacagtaaattgcagtccgaggaaggctaactggaatcaacatacccgtagctttagaaagcagtttccgcaccagcgaagagtacaagagcgatggaaccccatgttcctggaagtttgcacatcagagtaaacaaacttgaaaacccctcttgatagcagaattcacccagccttgttccattttctcttaacaaaacacaccgcaaaagctctcacaagctgctttgatgaagccacatgtatttcccccttcacaatttacaggaagttactcttaaaagaaagtgattctggtgtttaccgcctgtgttaaagggacagagttcctttttatttctgataacgtttgagcgaaatacagaaactatctgtagactagcatagtcggtacgtgagtaaggaaaagcaataacctgctgtccggtgagcacaaaattcctgctacgaacagtgccttactgctgcttggagactgcaagtcgcagatcacactaggtattgactgattgtataaggaaatttcttaaagtctaaagtaaaggtggtacctcctaaaaagaggggaagagagaaaactttgtgtggaaggataaggagtgtgtttatagtttcagtaagagtgtacgttttaatttttcttcttcctctgcctctttgccaagtagcctgagtgcatctgttatccagaagtagtattactctaggacaaacttcaaattcttcattctgcgttgcctttaaggaacaacatactttcttcctgttctttttccaaaaacacacgcctatggctctgtgtgtggtgttttagccagcctcctcccagataaggggttcccttccctcctttgcattgaaaggaaagtgcaagtctggacatgtttatcaagaggaaaagtgacttctcagtaatagactgtcaaattcgggctgctgcccgagtgttcgctttgttatggcaggtgaagttcacctttgccccacccagtgtttccacaaaaaggcaaggttccaagtattcatatgaacaagtgttactttaggacttggagggttgggggtggaggatgtttgcatagttgaagccttgggcgggggtgtaggaaacggcgagtacagaggccatagaaaaagctaagactcagtttgacgtcgtcagccggcttggtcttctacccagtgactcaaagcactaaaagtcagcataatcggaactgaagtcagtagcatcgcccatttgccattcactgcagtagcaaaagtagtactctgtggtgggttaatcggtttgaggcagctccttaaatgaacatttgtgtttcatttttctgttattttcccgaacatgaaaagacgataaaactgaaatggaaaaggtaactgacaaaagtgtgccttacctgtttccgccctgatttctgctgattcaagactattctggctaaactgattggattctttttctaactaggcagtaggggatcagaaatcacacacggtaccggctgtgtttattctgagaggtgctggggagctttgggtctgacttccttttacatgcctgtcttctcttttggacagatctattccagaggggagcttcaccacttcattgacggctttaatgaagagaaaagcaactggatgcgctatgtgaatccagcacactctccccgggagcaaaacctggctgcgtgtcagaacgggatgaacatctacttctacaccattaagcccatccctgccaaccaggaacttcttgtgtggtattgtcgggagtttgcagaaaggcttcactacccttatcccggagagctgacaatgatgaatctcagtaagtggattacagaacaaaaaaataaaaaatgccagtaatgtcggttctgcccctttgaactaataacatgttgtttaattatacggctttgtcatgtgttggatgaagtaggtggcttaagctagggactaggaagaggaaaaacattttttgagtccctattaactattaggaaacttgatcatttaaaagtatatatatatatgaggagctaccttgagttttgaattcaggatgttacaggaagaaatatatgtccaattctaatttatccaaaagcagttgggagaattacagggattggtccagacatgctgcgtatgcaaggtatagccctcatctgtggtactttggcagggcttagactgcatcaaaatatttatagatgtacatttgagtgtacagttaggatctgatgtggaacattgtaagatcattgctagaaaaactttgtcataatttttcaatattattctaagtgaataaccgtaaagattttacatcttagcttccttccttacagtaaaaaaactatctgatctcttgatcagtattatagtagccacctatcactttatcttaacaaattctcaattccttaggtttatgtgcttttacttcttttatttgattaaaattgctgtcatgacctctctctgcagagggctgcatcattttggtcattctcaagtgatctctttgagcaatttaagaattgccataagattctaacctctgctgtaactatggttgtgtgttcttggttagaccactaaatcttattagcagttttaaaaattattccttttggtttagaagttaagactaaatgctgaagtttttgtaacttttggttttgatatcatttcaaacttaagaaaacatttgaagaaaaggacaaagaatttccacttaccctttacccaggtttaccagttattgataagtatatccatttgctttaccagaaggctaacttgttttagttctcattttcacctttgagacatttggaataaatatcaatgttaacataaattggaattttgactttgattttaggaccaatgaacaagccaagtacttaccctagtcatatataatccaactgtatggttatttggtattcattccacacttcattttacttgatctcccttaagattgcaagattgtgtttgcagtttttctgaaaatctggggctataaaagcatcaggacctcccccgtaggggaggtcgtgtgtttggggtccttacacaacaggttacccttgagcttcaggaaaagaactggctctcagttccccagttccagcttaatgggtctaattaggtcctgaccaaaaaggtggcagttcttttccctcatgtctcttcagcgctccccgagactctggagactctgtcatatccctagggctgagcctcccaggaaccattcggctgttgtggcatctgtgtatgccatgcccagtgctgaggacctagtaacaaacgacaaatgcacaggcacagtggcatttttgtggaactcgtattccagctgtgcgtctcagaagaagcgcacagctccctcctggctttcttaacatagtgagccacttccacttaagggtctccttacattccttgagtttaatcattcatggattcagaggaaagtcttttgatttttgcttttctttaaacagttcatttgaggtgacctaccccagtgactttgcaccaaccaccaagaaacttttttgcatgcttcccgcaccctgtgccaatcaagggaagggtttaaaggcctggcgtttttattcctcaaagaaaggttttgcacagtattttaaggttcaagtgcttctactttgtgttcagaagcaactgtcatatatactgtgaaatgacaccttttatttatccctttttatttatgcagtatgtccccttttattttggcagaattttttctaaatggtggtttaacattttcaagcacatttcattgtccaatattcatagtaaagaatgagagttaacaataaccagtcacattaaaacaagattcctgctgccagttgtgaaaccggttgtcttaggcgtggcagctgatgattgagactgtgatcaggaaaatttccactatttcatcaggcctaataggtagattgtgtctccaaatgaactgtgttgggtttccatgcttaaagcacaatagaggtggtgcaagaatctccatgagggcttaaatggcagtgatggttcaggcggtagagtttggagaagaagggatttgaaacaaaccaaaggaaagaaaagtaagtagccagaaatcacaaaatggcatttttctaaaaacaaaggaaaaggaataaaagaactaataagtttgaaacccctacccctcccaaatttggcagggggggaggtattttttttctatctatctaactaacccatctagaaaacagttgaccaaattatagacttctaaatgttaatctgctttctcagtttcagttgaaaagagactttgttttgcctactgcagaacttctaggttctttcttatagtcttggggttcttattatagatcgaaaatgtgagtcggcataattaagccattcggagtcttcagaagcagttcactcttgaaatgactccgtccgcctacagccatttaagatttcagaacaaaaacagatcttgattttctttttcatgttaactcaagctgttgctgagtgggagagtcagaaatgacaccagctccactgattactcagctgctgaaggatgattttttaaaatgcacctttactgtatatggacttcctaatttccacctgtagagcatcttagggaggctaacatgtcactctggatgttcttttagaataagatgcaaatctatttttctgaaggcattagagatagcaaacatttattgtgagtttactatatactaggcactgtgctaagtgttttgcatagaaagtttaaaattctggcttttttgttggcccaatcataagtttcatatcagttcaacattcaaattatattaaggtacttaagaagaatccctggctaaatgtgaggggcagtgccacagatggactgaaactttatgcttattgcacatttatgctattattatttgttgaattatagaaccaagggagtgtggaagccactggaaaaaatatgagacttagatacataatttgagtaaaaatggctcaaagtcatgagggtaaagttttttgtatttccattttattcgagcggcatcgtttttaaaaatcattatgaatttgaccctatatagatgtttccaaataattctttttcaccttcataaaattccttcctgtggctgtgagatgccttgcctatcagttttcaagcttagttgtctttctcatcctttaccattttagctttaaaaaacaaaagtgacaattagaacttcctgcctgctgggcctcactgaaagaccgatattggcctgataaggagatatttattttgttttagtggcttcagaaatccctctccctcagcaagctttccatcacggcccccccgtcagcatcttccctgatagcgttcttctctgtgtttattctggggcttcaggctcgcccaggaggaactgataaccgctggcaggagataacattctctaaggggctctcaaattggaatcgaatccctcaagccagtcagcctagagaatacatttaaagggttcagttctggagtttcacagagttcatttctagacctatcagatagcaagtgtggagttctttctcaactaaattcaagcagagacattttttagacgatgaaggatatttgcacaaaggcttcagcatgatcccccaaacctgctgcctctgaaggcatctccacacattgacagccaatgccttcagtgcgttcctagggcaggtgtcctggcttgagtgactgtcctccaataatcagagctcaaactaaacatcgtatgttttacttttggtttccaggcaaggctgagcagggaattttcagttttccctgcccagatgggtgttttttcctgaaggcatcatttattgtgtagcgaggagacagggctggctgtggcagggatagtctagaactgtcctcattgctgctgttcctaaatagtatctttaccaagtaataacgtgccgtctttgggaataagtgctttcctcttagcctgttctgttttcttgggtgcgctaagtaattgaactggctcaggaagtacctattgtggtttggcagaggtgactgtcacgccttgtgactccaggggccagcactgctgggatcctggctagaccagacagagccttggtgaagtgcttaggctgtctgcacatcgcgaggaaggtggtattcacttcgctaagctccttggcataggcagtttgaacagggctttatcaaattcgtattcaacaagagtagaagcgaaaattgatgactgtgtattacttgaaatgagtcttaatctttcacatttagttctcagggtatgctgatttcctttaggtaaaccatgaacatcagaaagacttttattaacctatgacagggtccccaccccagtatttttccactccattaaaatggaagttttttttttttttttcttttttgagacagagttttgctcttgttgcccagtctggagtgcaatggcacaatctcggctcaccacaacctccacctcccagattcaagcgattcttctgcctcagcctcccaagtagctgggattacaggtgtgcgccaccacgcccagctaattttgtatttttagtagagatggggtttctccatgttggtcaggctggtctcgaacttccgacctcaggtgatccgcccacctcggcctcccaaagtgctgggattacaggcaagagccactgcatccagcttaggctatcttactccagcctaaacagcaattttctatcataaggtctgtactaatgaaaacagaatcacccaaggctgctgtttgttctgtctgtgctgccattgtccgcattttgctgaggaggaaacggaactgcacttttgagtgagtggcccagagccttctagaatgagagtgcgttggaagccagatatgtggcgattgtgtcgccagctgttactcaggttttctcaagaaggaggagcaactttggcagttttgcttcagttctctctagccctctgtgtaatcgcccctttttctttatttcagcacaaacacagagcagtctaaagcaaccgagcactgagaaaaatgaactctgcccaaagaatgtcccaaagagagagtacagcgtgaaagaaatcctaaaattggactccaacccctccaaaggaaaggacctctaccgttctaacatttcacccctcacatcagaaaaggacctcgatgactttagaagacgtgggagccccgaaatgcccttctaccctcgggtcgtttaccccatccgggcccctctgccagaagactttttgaaagcttccctggcctacgggatcgagagacccacgtacatcactcgctcccccattccatcctccaccactccaagcccctctgcaagaagcagccccgaccaaagcctcaagagctccagccctcacagcagccctgggaatacggtgtcccctgtgggccccggctctcaagagcaccgggactcctacgcttacttgaacgcgtcctacggcacggaaggtttgggctcctaccctggctacgcacccctgccccacctcccgccagctttcatcccctcgtacaacgctcactaccccaagttcctcttgcccccctacggcatgaattgtaatggcctgagcgctgtgagcagcatgaatggcatcaacaactttggcctcttcccgaggctgtgccctgtctacagcaatctcctcggtgggggcagcctgccccaccccatgctcaaccccacttctctcccgagctcgctgccctcagatggagcccggaggttgctccagccggagcatcccagggaggtgcttgtcccggcgccccacagtgccttctcctttaccggggccgccgccagcatgaaggacaaggcctgtagccccacaagcgggtctcccacggcgggaacagccgccacggcagaacatgtggtgcagcccaaagctacctcagcagcgatggcagcccccagcagcgacgaagccatgaatctcattaaaaacaaaagaaacatgaccggctacaagacccttccctacccgctgaagaagcagaacggcaagatcaagtacgaatgcaacgtttgcgccaagactttcggccagctctccaatctgaaggtaggccttgagagagagcagtccaaggggctgtgagtgcatgcttgtgtttgtatttagcttgctttccatggggtatcgattgcatttgcagtagtatgagcccccggttggggatagtgggtatggattccgcctggcttttgccacttctagctctttgactttggacaagtgacttcccttctcctgattttcttctgaataataaaaaaattaggggtttggactagaagattaggtgaaactccctgctagcctgtgatttttgtgcttttaagaaaaacaccattctgaaaacatgaagatttcttctttttaagactgtcttgatgcttttcttaagatatttgcatcaacacttgagtcttggagcagaaatgttaggtctcagagccagcttgagagcagagctaacacatgtggcttcttcccaggtccacctgagagtgcacagtggagaacggcctttcaaatgtcagacttgcaacaagggctttactcagctcgcccacctgcagaaacactacctggtacacacgggagaaaagccacatgaatgccaggtgcgcagtattttctgggtagaccttctgacctttgtagaaaatgtctgtgagtcaccctcccatgtcctatatagcccgtagttaaagccaacaccagattctgcgttgtcccatcctggactgatggcactatggtccttcccagtactttgtatctgctgatgacttgagatggcacagccagcttccagtgggtgggaaaatggtaggggaaataaacagcccctcgtgtgctgtgtgcccacatccccccgtttgcttaataccacactggaggtgccacaaggaggcttctcacctcctaggttgctgggcgttggccggtaagcctgcccctcccgttggcaactcttaatcttctggccttcctgtctcccttccctgctgtctctctcccctacactgtaggtctgccacaagagatttagcagcaccagcaatctcaagacccacctgcgactccattctggagagaaaccataccaatgcaaggtgtgccctgccaagttcacccagtttgtgcacctgaaactgcacaagcgtctgcacacccgggagcggccccacaagtgctcccagtgccacaagaactacatccatctctgtagcctcaaggttcacctgaaagggaactgcgctgcggccccggcgcctgggctgcccttggaagatctgacccgaatcaatgaagaaatcgagaagtttgacatcagtgacaatgctgaccggctcgaggacgtggaggatgacatcagtgtgatctctgtagtggagaaggaaattctggccgtggtcagaaaagagaaagaagaaactggcctgaaagtgtctttgcaaagaaacatggggaatggactcctctcctcagggtgcagcctttatgagtcatcagatctacccctcatgaagttgcctcccagcaacccactacctctggtacctgtaaaggtcaaacaagaaacagttgaaccaatggatccttaagattttcagaaaacacttattttgtttcttaagttatgacttggtgagtcagggtgcctgtaggaagtggcttgtacataatcccagctctgcaaagctctctcgacagcaaatggtttcccctcacctctggaattaaagaaggaactccaaagttactgaaatctcagggcatgaacaaggcaaaggccatatatatatatatatatatatctgtatacatattatatatacttatttacacctgtgtctatatatttgcccctgtgtattttgaatatttgtgtggacatgtttgcatagccttcccattactaagactattacctagtcataattattttttcaatgataatccttcataatttattatacaatttatcattcagaaagcaataattaaaaaagtttacaatgactggaaagattccttgtaatttgagtataaatgtatttttgtcttgtggccattctttgtagataatttctgcacatctgtataagtacctaagatttagttaaacaaatatatgacttcagtcaacctctctctctaataatggtttgaaaatgaggtttgggtaattgccaatgttggacagttgatgtgttcattcctgggatcctatcatttgaacagcattgtacataacttgggggtatgtgtgcaggattacccaagaataacttaagtagaagaaacaagaaagggaatcttgtatatttttgttgatagttcatgtttttcccccagccacaattttaccggaagggtgacaggaaggctttaccaacctgtctctccctccaaaagagcagaatcctcccaccgccctgccctccccaccgagtcctgtggccattcagagcggccacatgacttttgcatccattgtattatcagaaaatgtgaagaagaaaaaaatgccatgttttaaaaccactgcgaaaatttccccaaagcataggtggctttgtgtgtgtgcgatttgggggcttgagtctgggtggtgttttgttgttggtttttgttgctttttttttttttttttttttaatgtcaaaattgcacaaacatggtgctctaccaggaaggattcgaggtagataggctcaggccacactttaaaaacaaacacacaaacaacaaaaaacgggtattctagtcatcttggggtaaaagcgggtaatgaacattcctatccccaacacatcaattgtattttttctgtaaaactcagattttcctcagtatttgtgtttttacattttatggttaatttaatggaagatgaaagggcattgcaaagttgttcaacaacagttacctcgagatcggcttccccttgtgcaggaaagatttcttatctaatgatttgcttctatagaggagaaaccgagtaaatgtgctccagcaagatagactttgtgttattttatcttttattctgctaagcccaaagattacatgttggtgttcaaagtgtagccgaaaatgatgtatatttataaatctatttataccactatatcatatgtatatatatttataaccacttaaattgtgagccaagccatgtaaaagatctactttttctaagggcaaaaaaaaaaaaaaaaaaaaaaagaacacttcctttctgagactttgcttaatacttggtgacctcacaatcacgtcggtatgattgggcacccttgcctactgtaagagaccctaaaaccttggtgcagtggtggggaccacaaaacaaccagggaggaagagatacatcattttttagtattaaggaccatctaagacagctctattttttttttgccactttatgattatgtggtcacacccaagtcacagaaataaaaaactgactttaccgctgcaatttttctgttttcctccttactaaatactgatacattactccaatctattttataattatatttgacattttgttcacatcaactaatgttcacctgtagaagagaacaaatttcgaataatccagggaaacccaagagccttactggtcttctgtaacttccaagactgacagctttttatgtatcagtgtttgataaacacagtccttaactgaaggtaaaccaaagcatcacgttgacattagaccaaatacttttgattcccaactactcgtttgttctttttctccttttgggctttcccatagtgagaatttttataaagactttttgcttctctcaccatccatcctttttttttctgcctcttacatgtgaaaggtgagcccacaatcaacagtggttttattttttcctctactcaaagttaaaactgaccaaagtactggctttttactttgctagaacaacaaactatcttatgtttacatactggtttacaatgttatttatgtgcaaattgtcaaaatgtaaattaaatataaatgttcatgctttaccaaaa

SEQ ID NO: 13031 - DNA, 1374 bp, Homo sapiens
tttaaatatatatatttatatctcaagactgctctgagatactcttgtccccagtagttttactgccaacaaataccaataatgacaaacggtgattaaaagggcagatagatgtaaatgaaggcagaggaggaggatgaaatgaacatctgcttttttcagctctctgacagaaattcttaaaggaccaaaaataacactcttgtttcaacttatgttaggtgtaggaaaattttctttttttctctttccagtctgagtatgcttcattgatttgtatattgaatactaaattgttttagaaaaaaaaatcattggctgataagacacttaaatgagaaaagctagtctgtcacaggcatgtaggtgtgccatatctatttaaatagaggtttaaattattgatgagacttaatgaggaactggtgtatattgtaaccaaaattgtagattccactgtgaacaatctgtgcatggatcgattcacatatttgagtctaccatttcaggtacatgaatgtacaggagctactgggaatataaaaactggaaaataaacattatcatctattaccactccctcctccttggtccattttagtaaagaattcagtaaagtgataggtaggctatcttgaatgagaagaaaataaaactaggaaagtgagagaataaaaaccaaaacaaaactgtaactgcaaactgttgtaaaggactactcacagaggagttctattgaatagtgacgaattgcttcctgattcacggttggtgatttttttaccccttcaaagagaaatttattattaaggaggaactggtatagttaacatgtttctttagcaaggccccacaaagttaaaatgtgtgatgcatccagtctgaggtcatttcctcagatcttagaacctacagctttcctccgtataaacttaatttcaaaggagggcttttggccaggcatggtggctcagcctgtaatctcagcactttgggaggccgaggtgggaggatcgcttgagtccaggagtttgagacaaggctgggcaacatggtgagaccccttctcaacaataacaacaaaaattagctgggcgtgatggtgcatgcctgtagtcccagctactcaggaggctgaggtgggaggatctcttgatcccaggaggtcaaggctgcaatgagctaagatcaagccactgcattccagcctgagtgatagtgggagaccttgtctttaaaacacaaacacacacacacacacacgagggcctttgaccactcttgagtagaagactcgagaagaacaaagtagaaggccagagaagaacaaagttacttgaaagatctcttattaaagagaatgtacaagctatg

SEQ ID NO: 13032 - DNA, 3331 bp, Homo sapiens
tctagagcttttgctccattcatttacatatcattttattaaaaacttactaagttcaaaacaatgttaaaataagttgtccctgcccttggggagctcagctaagtaggttttgtttttcatatttctgctgcaagtgcctccgatgcctgtctgttgctccttaggactggccaaccaagcgcaccaggtgacacttcagtgaatggccctgtatgacgggtgacgtctgctgctgctgactgaggactgcagaccgccaccactcaggggctctggaggggtcagctggagcccaccaagctgtcactgctgcactcactctgcaagggatcaggaccagcaacctttatattctagattctaagacattgtacagagaaattcagaagtgtaaaaatattgcacattgacaaataccaagaatttttgcgtatgtttatattgtattgttctaaataatgggtagcctgtgaaataagatcttgccacccatgtaataatagtagtaatactatagttaaaatggctgtaagaatagttttataaaagtgaatacacagatctattgtatttgaaacataactttgacaattattagtgtgaccaaagtattaggcggttttcatacatttttcaccttgtacaaaattatgaattcatttttcctccaggccgacaaggagttgtagaatgaaaatgccctctaagtgttattttggttgttctaacttacaaaagtgattttgaataagaaatatttggtgttctttttataaccagtttttgattggtaattgttttctgtattgtttaaaacggatcaaaaatgtaagtctattggtagagattaagtaaagtatttattgctacatcatagttgataaattgatgttatcgtaaagccatatgttctgttcaagtcttgtttgcttgaaatgattattcctacaagtgaaacactagactatttggagtgtatatggcttgtgttttgggatttttttttttttttttggcttttgtttttgtttgtttttttgtttcgtttggtagttcatctgccttttaacccattcaccaaaatttaccttgttaacaagcatcaccaatgaacatttcagagcaatctgcatatttaacagacctaaaataaatcctattaggcaagtcagttgaaaatgctcgtgctgctaatggaattagagtgcgttcattttacaggctagtattttaaaagtagaaatcaaaatctggcaccgaagcatgctaattgtttactgtaccttgtgaggttttcactcataaatttaaaccagtgtatttttttagaactggtttgtgtatatatatagtgattatggatactaattcaatgtaatttataattttctatgtcaatacaaaaatacatcacagccttctcaaacagctcaagcaatatattgtatattgccatatcgtctggtgaaagggttaaattacttcacctcttgcacttttagatgcaaatcagtttttcatttctgtaatagaaaattattcacgtatttttacatcatttgtttttcctgaccagtatttaaaaccaaaaggatattctgaaaaatggccaacaatttttttagaagtagcatcccaagcagcgtgcctaaacattacattgcatatggaaataaaagaatcaaacgtctaatgccttattatttctgatttcctttttcattttaagtggtgtggagattccagcactcccaggacagtggagtcagcagtaagccctgggacaggtggcaagggtgggtcccttgacctttgcacgcctcctcaggaaccccctttcccgggtgagcccctctctgaagagactgtccttgggcctcctctggaagcagcacccccagaggacagggctcctcctgcttgcctcagggctgcctgacttgaatggcgttggacctcggggattactggtagataatatgctctggtctcgcctggtggtgagttttgccagccatggccagggtttggctccactggtggcacacgtggcctccgtggtatggacctggtggcttctccatcccactgtggcctctgtggtatggacctggtggcttctccatcctacccaaggtaacagtgtcttgcttcatcccactgactgctgggagagagcctctgggacttttctttggggcatcattttgttttgtctttcgtagcagggaaaggatatgacaatggggaggacagttcttttggaggttggaggggccaagccaaggacaggagcaagtgtgccctcattttgtttctacttttaatttctgtgtgttggccatactgaattatgagactaacagatgtctacaatacaatacctgtattcaaaataacaaaaataaagcctgattctttgtttctagaaatctcttgtaccttgcttggatttttaatgggttgatgtgtcctgccattaggtcccgtgttacactaggtcctgtgtgagaaagactgcactgcactgtgtgagagagtggcctctgggatcaggggctcatcctccccactgccatagcccaggtgcccagaagaggtggtgcctgacaccggctctcagtcttgggacggctccaagggttcctctggacctccagcttgttacttttatgtgcagcgtgtcccacctatgttgtttggctcccagcccaacaagtcacagttaggtgctccataatgattcttaagatgtgatgcttatgtagctccttattttgcattttcccttcacctgtttgcttaaaaacatgttctctagtcattacctcctagcaggtcctctgcacagccttttgctttctgggcacgcatgcatccctccgtgcctgggcccacaggcatctcacacagcactgagtacacacctctgcatgctgggcccgcaggcagctcactctgagctgtctgggtacccacctctacatgcgagtccataggcatctcactggcaatcgtgtaaccagggcacaagctctccagccgggtggctcatcacagcccaactcagccactcatgatggtgtgaccttaggcaggtcttggtgtcagctttttctgttgggtggggaaacaatgggaacaagttcaaagacttgaatagctttttacttacggtaaatgtttaacaaacattagctaacttttactcacttaaccccataatgtcacctgctagcctttctaaatttccacttcaatcccacctattatttaaaacctttaccttcagaaaagttgagcatcttaatcagatgggtttcactgc

SEQ ID NO: 13033 - DNA, 11585 bp, Homo sapiens
ttgtgcactcattcatttaacagacatttattaagcgtctacaatgtgccaggccctggggacacagagctggagaatgtacagtccctgccctcaaggagctcacagtctggggggacagacatgtaaacacatgagttacaacgcgctgcgtgaagtgtgtggcagaggtataacaaagtgctgtggggcacaacagagcgaccagtgaactcttcctgggcaggggtcagggaagccttcacagatcagtcaataaatacggtgccatgggagtgccttgcacaccacgggcactcacatcttgaatgctggtccactggaggcccttgggttgggcgggagcaaggcctacttctgcttcctcaggacaacttccccacctctgtcctgggaccacctgcccgcctgggcctgcagtgactaaggacgctgctcccactccaggggccagtgacagagagcagctatacagagggcccaccccgcaggatccttgacaggagctgagacagaacaaactgctgcttgtctccctaccctgggggctgtgatattcttggtaacatctctgagctggtctgtgaggtcacttcctcttttaacactgttgaggagactccaaaccctgtcttttcctcgtcttctcatgtcgattgggcaccagccattctcaggcaccagagcacagccccacacgggtgccccatcagacagggctgcccacagcagcctcctacacctgaactgggtttctctgcacactcacagccgtctcaccagctcaatgagctgctggatgtttttgttttggttcgacaagccgttcctgatgttttcgagtaggcatctcttcaattcaaatatggcttcactgtaggccaagctcactgcggccatgggaggtgctccgtgccacaggcctgggatgtgccagatgtgctgcttctcagggtcgcagaaggccaggcctgccagtgcccggaagccgtcgccctgtttctccatctgggctgcagccctgctcaggtcaccaggtggatccaggagctgtctcttgtctctgggcctagggccgggaacagatacatcatgaaggttctggtatacaaactggtagttgggcatgtgccccgttttttctaacctcagaaatgcatgcagaatagctgctggaatgtccttggtttcagctagactgatcacggtgacattgctcagtcccatgagcagagtggccaaggaagcctccagctcaaatctgtccccagctgacgtcaaggccccacctatcaagcccccggagtctatcaccaggatgtggtcacagcccaggtcctggctgaagccctcagccactgtgatgagctgcatgaaggcccctcgaggaccgcagctcttccctgtggcaaaccgcagcccaaacatggtgttgaggagtgtggacttgcccgtgcctggcaccccgacggttgacagaaccaccagccttgaccgtctctccagtcggacgtgcagctccttcaggagccctgtgacccagcggacgggcatgctcagcgtgctcccatcgattagctccagaggcagccctgtcagcagcagctccgaggccaagcctgggaagtgggcaaaacgcctctggcctgccggcagcctccctgcctccacaagacagctctcagcctcataaaactgtcccatctcccgcaagaagtgttccacccctaggggctcaggccagagcggctcccccacgtctgtggtgcccccatgctttggtctcagggtgagaagcgtctccggaggctgtctcagtcgcggctgggccacccgtgccaggccccactccatccacctcaggaagtactgcttctcactcaaggaggggctgctgatccccgagatgaactcctgcacccccgaggagggatcatggccgttctgctgcattcgaagttctagcagccgccgcctcagctcagccctgtgcttctcaggggggtccacggcccactggagctggcagaactccttctccacttgggctgcctttctccaggggtccccctgcagcctcagctcgtcccttctgtaggcatccgagtctttgattttcctggtaatcctctccatccggtctttcgctttctgacactcctcacagtcctcgtcgacctttaggcccagtttgcgggctgcgtgcgccatgtcctccacagatacccgcctgcagggtgcccgcagcacattcccaacgatggcccggatcctcttcacgaagctgtcgctgtcagtgctgctgacctttaccaggacatgtgagtggtctattttcagcacaggaattaacttattcagaaatctcaggtttgtgttgcgcttcccacggtagggactcaggatgaagtagtattttgtggttgactccttcatggagtacagcaatttgtattccttcttactgatattgtcagtcaatataaacacagcggaggagatttctgtcaagagcttaaactgcagccagtgagacccgatgtcacctctcaggttcagaaaggccacaggttctgggaaaatgtccaagtcctcccttccgctgggaaaaaaccaggaaatttctaccaacccatccgaaatctcccgggcattggtgcccaagttgaggtcccgatgccagaagcagtcccactgcctgtggcccgggctgaggacggcgttgagaagctgggacttggagttgctactgacgtccatgcgcacgaaggcgaaggcgggcgccctggacaagaccacgctgtcttcccggaagctccccatgccccttgggggctgggaccaccatgtcctcacaatgccccgcatggcccacagcagaaatgtatggtagtggttctccgagtcaggcaacacgagtgggagtgcaaactggcagagggccattttcaacgctatttcttgttgcaggaaactgtctgaggagagcagcagggcacagagaaggtctaaggggttcactggcgtatcaggggtgggcagctcagaaaaggaataaatgtcggcagcaaggtcatcagctgggtcccagtagatgatctcctcttccatctggctctccttctccacaggcctggcgtctgggagcacgtccagcaccatagtggtattcctggcatcagcattgagggcctgcaacttcctgaggaaattccagggcaagtctttgggaacctgaggggcccagttcttcatactgtcaaaactgatctgcagagagtcctggaggctgagtttctggacctggtacgtctctaggcccaaaagtgacagcatttcttgaagcctgcttctctccactgtggaaagaaatgaagacataagtgctcaccctgtgtttctgagctaggggccagggaagagctggtgaaggagagcccagcaggatggggagagtgacgacccccttcagagagcagagtgcaggcacaggaggctcagggtgtgctcaaggctgacctgagatcaaggcagggctggaacccggacatcaaggtacaataggtaccaacctaaccacagatatatgtgacattaaacaaaagaaagaacagaaataaataagctacatttaacaactggaagagttcttgcaaaagccatatttctggtctttctagaaacctgtaagatctaacactgagctcaaaattaattggctacagtgagcagcacatgactcctacaagctgaatgcaggcctcacctccccactgtgttgcttccgtgggctactcagagtcaccgggaagttcccacaggagtcataatcactgaatcactctctggctttctagttaatgtttttttgtgttttttttctctctagaaataagagaatattttaaaggaactagaaagaaatcactaagcataaagagtcagcaattatagctaaacaaccattttgcaaacctgaaatcaataatgcaggttttcttttttttctttcttttttcctctcccctttcttttttttttagacagggtcttactctgttacccaggctgtagtgcagtggcatgatttcagttcactgtagcctcaacctcctgggctcaagagatcctcccacctctgcctcccaagtagctggaactactggtgtgtgccaccacacccagctcatccttgtatttttttgtagagatgggtttttgccatgttgcccaggctggtctcgaacccagactcaagcaatccacctgtctagccctctcaaagtgctgggattacaggtgtgagccatggtgcctggctttaatgcagttttaaattttaaatgtattaaaatattcagtgcagactgttagtaagtgagcacttacttgcgcagatactcaaatatcaccctatacaatataagatcttataagctagatgcttgaaacagtattgctacctctgaagattccattcaccatccaggtcttggcccagcaccttactaatgttcatgctgcatattaattagttgtcttaaaatttgttgttgtttgaggcagtgtctcactctgtcacccaggctggaaggcagtggtgtgatcacagcttattgcagccttgatctcctaggctcaagagatccactcatctcagcttctgaggagctgggactacaggtgcacaagacacttggctagtttttgtatgttttgtagagacgggattttgccatattgctcaggctggtcttgaactctctggctcaaatgatctgcctgcctcagcctcccaaagtgctggatgtgaggcaccgtgctgagtcactttaaatgttaatgcatgaagtaaatacaaattccactgccctgcagccttttttccagttcctttctcgagagaggaagcaacgtgtatgatactgctttgatgcttagataaaccatgaaaggaaacactgggtgacccagccctctgcctgtttcccaagaaggtcaagtgatggattcaagaccactttccatacgaccagcaggactcacagtgctggacactctgctcagagagttccacaggcattgtggccacaggactgccccacagaacattaggggacctatgaacttgttacaaaaacaaaagtactatatgggaagagtcacattgtgccaaaacaggtgttactcaggtttcctagctttgcctgaatgaaactaggaacattgtttttcttgtccagacatggaataactttttattttttaagtagcatggtagtaaaaggcaatgggaaaaagacaaagaaaacacttctgcccagtgtgtggcccttggcaggttgtttggaagctctgggcccagtatcctgatctgcaaatgaaggcgttggaccagataaatcgtttccaaaccgggctgtacattagaatcaatcacttcaggaacttgttaaaaaatgaaacatctctgggtttcacctccaaacatgctaacttattaaaggcagtgagtatgttgggtggtggagggggggcctggttactctatgtggttagcaagcttcccagggtttttttttttttttttttttagcaatatggttaacaatgtataaagggttaatgaagtagggcatcctaaacctgagtgctctgcctccccaggtgatttgatacagtcaggtgtgggaactgctggcctagatgataaccccctttcatagaacagagagaaaaggcagagaaaatgcttacctgttggaaaatcattgtcctgagcctcatttgtaccatctatggaaaaagcaatggaaaatgaagtgtcaatcaaataatgcacccttggctgacacaaattaattgaagctaaacctagaacccttctttctcaccaagatggcaacttctcccaattgttctaaatataaaatcccggttatctgtcactttacccactccccctctccccagtccaatctgttgccaaatcctgtagtttctacctccataacggaactcgcaatcatctccttccatttctctccattccaaatctagaagaaaaaagaaaccaaatacatttagtttcatcagcaagttagaacctttctgtcaaaaatttcaagtgctcatgcctgtaaccccagcactttaggaggctgaacaagaggagtgcttgagtccaggagtttgagaccagcctgggcaacaaagcaagaccctgtgtctacaaagactttttttaaaaaattaggccaggcatggtggctcatgcctgtaatctcagcactttgggagcccaaggcaggaaaatcacttgaggtcaggaatttgagaccagccagcctggccaacatggcgaaaaaccatctctactaaaaatacaaaaattagctgggcgtggtggcgcatgcctgtaattccagcttggaattacttgggaggctgagacaaaataattgcttgaacccaggaggcgggggttgcagtgagctgagatcatgccactgcactccagcctgggcgacagagtgaggctatctcaaaaacaaacgaacaaacaaaaattagctgggcatgatgccacgagcctgtggtcccagctgaggcaggaggattacttgagcctgggaggtcaaggctgcagtgagctgtgattgcaccactgcattccagcgtgggcatcagagcaagaccctgtctcaaaaaaaaaaaacaccaaacaacaacaaaaaacgtcaagtgacaatatggtggctgatgttttagtgctattattggtttcagtttttcctatgtaaatgtaatgttttgccagcaaaaaatacatcacaaggtagtaatagctacacacaagacacagatttgctctaggatatatctttatagaattttctaaactttgggaaaataaaacatgaataaccataaaacttacatagattaacctttgattttagaaactatttaaaatgtaagttgacagaaattccttgactatttaaaaattcagcacctgtcaatgttatttttattccagcataaggaatttttgtaatcacttaaaattgaaatgtacatcagagcacaaatacacagaggtgaggtgcggggggagagacagtggggaagagttgtgacttacaagtgaactgttatttgtccaaagtctccaaacatcatgaaatgtccatcaacattaacatcttaattacaaaatgtgtttaatgtagtgctagtcagatatttatgtatgaacaaagacctaaaactctagatttgcttgcaagcacacaatataaaggagcgaacaggaggcttaggaaggagggagcaagacttctcagtgcatgttttgactattttgactttgatccaagaaaaagtaacacctaggttccaaaatttatatatataaatatatatatatatacatatatatatatatatatatatatattttttttttttttttgagatggagtcttgctgtgttgcccagactggagcgcagtggcgcgatctcagctcagtgcaagctctgcctcccggattcatgccattctcctgcctcagcctcctgagtaggtgggactacaggcgcccgccaccacacccagctaatttttttgtatttttagtagagacagggtttcaccgtgttagccaggatggtctcgatctcctgaccttgtgatccacctgccttggcctcacagagcgttgggattacaggcgtgagccaccttgcccggccccaaaatttatatttttaagagcttatgaatcaagattcggatattttcagatttatgttttctcatgatttccatgtaatcaggtagataaacctaacatttcaaaccgtcttctttgatgatatctctgggagatggacatgtgaaaagcaggaaagagaaaaagaaaatggggtccaggaagcatgagaagatcagagaaggcacaagatccacacacatcaaccacaatgccaagcagtccaaagattacattattcaagtgaggaaaagccatcagaacaaattttccaaggaacccaaaatgccctgtgaggagagaaaatggttagagaaaagaatgggaaagtctaaagatgccagagatagggttagggtggttctgagagtagttttaagctggagtcaggagtaacctccagacccagagaaaatagggccttgcttggttaggggtgggaaatagctctgatgtggatttaataggtggatgaggtcaaggatgcacaaagtagccaaagactgagggttaccaaactaaggaaaccactgactagggttcggagagagcctgatgttctgcagccatcagcagattgtggggcaggtggaagaggaagcagcagggctccaggcaaagacacaaaacagcaaacatggggggccactgagggctcagctccatgagccaacgtctccactatacttcacattgggcaggaagtgacctaaggatgagataagctctgactctgggagtactgggctcacacggaacacagggacagaggataggccaggccctaccaccatggtgagcccaggaataactgttatgagcccattgttggagaactccaagtaaggccattaaaaccattttcaagccaggtggggtggttcatatctgtaaccacagcaatttgggaggaaaacgcaggaggatcacttgagttcaggagttcaagaccagcctgggcacaatagcaagacccctgtctctacaaaaagttttttaaaaaattagtcgggtgcagtggctcacacctgtagtcctagctacttgggaggctgagacaggagaatcccttgaggccaggaggtcaaggctgcagtgagctatgatggccaccactgtactccggcttgagtgatggagtgagacaaaaatagaatgagctatgaagtagaatcttcagagttgagtaagataaataaattatatcgtgtgactacataaagtataaaccaggcaaagctaatctatccttttagaagtccagataatgacagatgagaggtgaagtaactggaagggacctttgggggcatgggttttcttcagcttctcgatctggtttctggcttacataggtaagttcatgtttgtgaatatttctcaagctattaattggagtacttttctgaatgtatagtataatttttttttttttttttaaagacagtcttgctctgtcgcccaggctggagtgcagtggtatgatcccggctcacagaaacctccacctcccaggttcgagcgattctcctgcctcaacctcccgagtagctaagactacaggcgcccaccatccctcccagctaatttttgtatttttagtagagacggggtttcatcacattggtcaggctagtctcaaactcctggcctcaagtgatctgcctatctcggcctcccaaagtgctgggataacaggcatgagccactgcacctggcctgtatagtatactttaatacaacttgtttttaatcctataggcttaaaaccttgctttaagtctttaaaatgaagcatatgctcaagaggaactcacataactcatgaagaacaactataaagaataaccactggaggtttattcagtagagagagacacagagatcaaagttcggggaagaaccagggtgtctctgtgccttggtttcctcaaatgaaacagggattgataagtatcttagaggtcatagttaaaagtaattaagacaacctagctcacaataagcatccaataaggccattccctctcctcgccccatccccatgctttctttctcatttgtctagaacaacactccccaagggaacctcccaagctgaagttctccatctgcaatgtccaagctgcagccactcaccatgcaggctgctgagcaaatacagctagagtatttaggaggtgaagttttaattctgtttaattttaaacaatgtgcctagtggctactgtgttgaatagcataattctagatgtggagaaactaaagggctttgggcaattactgcctgatcccaattctgctacaagccttgaccaactggccaataatccccatggtgcctaccttccagaatttaagttccatgaagggctttgagccttttcatttactattgtttacaatatcgcaatgcttacaacaatgttagtgcatggtaagtactcaaaaaatatttgtttgaatgaataaaatagtgattttttccatagagacggtgtctcactatgttgcgcaggttggtctcaaactcctgggttcaagcgaacctcttgccttggcctcccaaagtactgggattacaggtgtgagccactgtatccagcctaaaataaaactttattaaccaaaacttatttgcatatttttgtggatttttgtttttgcataactctattaatatccaatagaacacttttttttttggcagttaaaacatagtttatttttttagcacattcattttaagaagaacctaatttatgaaagatatatctaaaatgagttactggctgggcacggtggctcacgcctgtaatcccaacactttgggaggctgaggcgggtggatcacctgaggtcaggagttcgagaccagcctggccaacatggtgaaactcatctctactaaaaatacaaaaaattagccgtgcatggtggcgcatgcctgtaatctcagctacttgggaggctgaggcagcagaatcacttgaacccaggaggtggaagctgcagtgagctgagatcgcgccactgcattccagcctgggcaataaaggcgaaacttggtctcaaaaaataaaataaaatatcaaataaaataataaaagaaaagaaaatataaaacaaaatgagttagtaagagagctaaagatatctggagtgtggccaccataccttaaaggtgaatttacaaagggtggcgttacagccccacccccaaatcctcagagaaagaaaaaccagcctgtatggaccataaccaggaagactacaagccccagtgtgctctgggacaatcccaatttatacctgttttcccaacattacatccctttcactctcagaagtgcccactttagaagataaactatacagtcaccttaactatgacctacaatggcagttatgctaaaattggggtaatgtgtttctgttaaattgtgtcataatcacctgtttaactgaatcctgggaacacttactccattttctagaataaagtgttgcccataaaaaaaacaaacaaaaaacactattttgaatatatgaggaatgcttaaaagacccttagatggaatcttcttgtaaaaggaaaaataaaagccttaaacttatttatttttgagatgcacaatcccaagtccaggaggggctggaacccagaatcccaaggggacaggagaagtacttcagctccagagtgggcccacatccaattcatccaactttacctgcaatggccacagctgttcgtctctctgatgcttttatttctggggctacttctcccaaatctgaatgcc

SEQ ID NO: 13034 - DNA, 1115 bp, Homo sapiens
ttagtgactcagaaagaggattttcccttttactgggctaatacaccacacctgaggagttggggtagttaccagatcaggtttatattgtataaactgcagaccaccaccagttctgctaggtgctgtttcagtaaattaagatagtatcgatgagaagatgctgttttacataccattaagaaggaaaactggctgcaaattatcttaaggtaccattgattgattaaaagatgaatcctgatctgacatgttaaaatgtttgaggctgatgcagaaggcagtttcctctccacaaacctcatgggtgtgcagaatggtgtagacacagagatgggtgcctcacttacctcatgcacagactggcttttccaccacagggcaggcactgtataagcaccttccattcctacacaggcgctagtagggggaactaaggcttggagaagccaagtaactttgctaaagggtcatataattagtaggaagtaaggctgaggttcaaaaccaggccggacatccaatgtgctgaagcaagctacacctcatctcacaagagaggcgaagacacgcttgttccttgtcccaagcactcttcaggcccatttcctccaagatggtacttgcttggtttgacactttcatcaaacaggaccccttgtgagcacacggccatgctctggtgagcagcctgccgccctgtccacctttctgggtggctctctctctactaagcttggctccaaggacatgaccgtccagtagccccatggcaaattctggggcttctcagacctgaaggtgagcattttgagctccagatatgaaaggcaagtcctgggtgttgtgttcattggaatcctaagagcagcactgactggagggctaaaggcaaggcccatccacagttcacagacttgaaacatcaacccttcaaaaagggtgggaggaggctgggtacggtggctcactcctgtaatcccagcactttgggaggctgaggcaggtggatcacttgaggccagaagtgtgagaccagcctggccaacgtggtgaaaccctgtctgtactaaaaatacaaaaattatttgtatttttgtgatggtgggcgcctg

SEQ ID NO: 13035 - DNA, 65854 bp, Homo sapiens
ggcggtgctgatgcagtcacgggaacaggtttcagaagagctggtgaggttacagaaagataatgacagtctccagggaaagcacagcctgcatgtgtcattacagcaagcagaagacttcatcctcccagacactacagaggtaacttactttccacatgatcaaaaatgtcaacaagtacgttttctgaaatggccgtatgttctttatgtaaacagttttattcagatataattcacgtgccaattcaaccatttaaaatgtaccattcagtggtttttgctgtactcacagatgtgtgcaaccatcatcacaatcaattttacaacattttcatcacctcaagtagtaactccctgtgacccgactacaccagctaaacacacacacacacacacacacacacacacacacacacacacacacacgaaaaagtaacacttcgccctttagctaccatccttattccccctcctcccctagccttaagcaactactaacctttctgcctctatagatttccctattctggactttcctatgaatagaatcatacgatatgtggtcttttgtgtccatgttctttcacgtagccttaatgttttgaagatctatgttatttttgtcggcccagattgagagtgtgccagaaattaaatgtttgaaggggttaccatgctggctgcttatgacgtttgtttttgtatctagtacttgaaaagttataacacactcaccatcatgctgtccataaagatgacacttttgtttctttttgagacagataatatctgtcacccaggctggagtgcaatggcatcatctctgctcactgcaacctccgcctcacaggtttaaacgattctcctgcctcagcctccccagtagctgggattacaagcgcctgccaccatgcccagctaattttttgcatttatagtatagatggggtttcaccatgtttgccaggctggtcttgagctcctgacctcacgtgagccaccatgcccagccaaagatggcacttttggtcacttacattcttctgtggttgggtaaacctgggctacaaaactggtttcccagagacattcataattctctccttaactttatccaagcttaatttttaatttttattttttgagacacagtttcattctgtcccctaggctggagtgcagtggtgtgatcttggctcactgcaacctccgcctcctgggttcaagtgattctcctgcctcagcctcccgagtagctgggattacaggcgtgcgccagcacgctgggctaatttgtttctgtatttttattttttttattattttttattttatttttattttttgagatggagtcttgctctgtcacccaggctggagtgcagtggcgcaacctaggcttactgcaacctctgtctcccaggttcaagtgattctcctgcctcagcttcctgagtactgggacaacaggcgcgtgccactgtgcctggcaaattttttaaaatattttttagtagagatggggtttcaccacattggctaggctggtctccaactcctgacctcgtgatccgcccgccttggcctcccaaagtgcggggattacaggcatcagccaccgcacctggcctttttttgtatttttagtagagatgcggtttcgccatgttggccaggctggtctcgaactcctgatctcaggtgattagcctgcttcggcctcccaaagtgctgggattgcaggcatgagacaccgtgcctgtcctatccaatctttatacctgtttctttttttttttttttttcctttttaaggaaatcttagtaagtagaagtttcccctaattataccctacagattcaatctctataatttggacctcattcttttttcctatatatgtattaacatgactgttattttttatgtttatttcatcatttacaaaaaaccagttgcctatcttgccattagctctttgctgtctcccacctttccccaacttcttatcgtctcagctcatgttacaggcactcttggcagagccttctttcctttctgaattggtgactgctgtcatcaaaagaaggtatcgggggcagggtatggtggctgaggcctgcaatcctagcactttgggaggccaaggcaggcagattgcttgaggtcaggagttcaacaccagcctggacaacatggcaaaaccccgatgctactgaaacaaacaaaaaaaattagccaaggatggtggcacacacttgtagtagtcccagctacaactacttgggaggctgaggtgggaggggtcgcctgagcccaggaggtcaaagctgcagtgagctgagatcgcgccactgccctccagcctgggagacagagtgaggaccctgtctcaattaaaaaaaaaaaggttttgggaacctgtctacttttgctatcagcttaaaatcactgtttaccaccttccacctgttagatttttctcttttgtcaggaaagaatcctgtcttccatgttctttagagactttattcctagattttatttcattttatttatttatttatttatttattttgagacagagtcttgctctgtcacccaggctggagtgcagtggtgtaatctcagcttattgcaacctccgccttctgggttcaagcaattctcctgcctctgcctcctgagtagctgggactacaggtgtgtgccaccatgtctggctaccatgttggccaggctggtctcgaattctcgacctcaaggaatccgccttcctcggcttcccaaaagtgctgggattacaggctttagccaccgcgcctgcctagtcctagatcttaaaatgttccaagaatccaggccgggcacagtggcacttgcctgtaatcccagcacattgggaggttgaagtgggagttttgcttgagcccaggagtttgagtctgtggtgagatatgattatgccattgcactccatactccagtctgggtgacagaggaagatcctgtctcaagaaaaagaaaaaaaaagttccaagaatccttgaagaatgtagtcagtgtgtaatccttgattcttggacctgcttcagcaataaatcttaggaaattttaaaaactgttgttttatatatattgttatttgagaatctcgtttttactttagagttgctttaggatataattggaaggatttctaaaagaagacagaactaaaatttaggaagaaaaataaattctatactgaatttattacagaaaaacagcttaccaccttagaaagccacctttgccattatttacctctggcctaaggtagtactttgcctctggtagatgtttagtaaatgtttgaatgaatgaataagtgagtaagtaaataaatgttatcctcttagttcacacttgctactgagtgtgaacttgctactcagttttgtcttcatttcctaactcctcccaaatttctgcaagtaatagtagaggattctaaggtattatttctattgaatggcatattgtaagtcacttaatctttttatttttctgcttatgaaacagttttgagggaagagtatgtggcttacaagatacgacttggccagaaatgtcttttctataacatactgaatgttaacctgacatggcacctgccctgaagctctaagtggcttaatggtcaaagtcttaatttttgaaccattaaaacaacatctgagattctggttacagaaaatctttagcttctttatttcctttcactctcacaaacccaataatcatttgtttcttgaatccaggcactgcgggagttggtattaaaataccgtgaggacatcattaatgtgcggacagcagcagaccacgtagaagaaaagctgaaggctgagatacttttcctaaaagagcagatccaagcagaacagtgtttaaaagaaaatcttgaagaaactctgcaactagaaatagaaaactgcaaggaggaaataggtgaagataaaagtgatgtagtttagaattagagtcactaaataaaactttagtaaaagaagcaatacatggccatggagtctggaacacagaaaagcttaggaaagaatttagtaaggactcagtccattttttgtagatattctgatatattcagattctgaatatatattctgatatagtcaaataatcagaaattctggttatttaaaaaatttttttttttttttttttttttgagacggagtttcattcttgttgcccaggctggagtgcaatggcgcgatcttggctcaccgcaacctctgcctcccaggttcaggcaattctgctgcctcagcctcccgagtagctgggattacaggcatgtgtgccagcacacccagctaattttgtatttttagtagagacgggtttctccatgttggtcaagctggtctcgaactcctgacctcaggtgatctgcctgcctcggccttgcaaatgctgggattacagttgtaagccaacgcgcctggccgaaaactcgtctttttaggagttctgtggcctctttggcaattattcatagataggattctcagtacttgaacccagaaccaggggaacgtgattcaatgggtggcatttccctgcagagatgtgatacatgatctagaggtagtttatgacacagtgtccatttgcatggatcctgcttttccctgagcctaaatatgctgattgcttggtggtaattttgagacagcccccggaacccatgttcagcatacatttgaatcctttggggggtgctctaaaattttaaagaaaaaaatgttcatgcacaataatagatgaatgctaatacatctcatttttttccttctagcttctatttctagcctaaaagctgaattagaaagaataaaagtggaaaaaggacaggtaagtcgtgagtttcaaattaattctatcagcaaccagtggttatttactgactcctactatgctgcacccaacgaataaaaaatagttaaggcatgggccctgccttaaggaacttttgtcttgtgggaagaaaaccacggggtaagggtgtgctggtgatttattgagagtgccctgtgtgtcaggctacgttaaactggaggaggtaaggctaagatgtgactgtggcctggagtttccagtgtagtgagaagataggcaaggcatggtcataacatgttatatgcttagaggtacagtagaaatatgtataaaaaacattacaaacaagagatgacattttctagctggcttagtcctcttagacatcattagttcctttcatagtaaccccattcaacttcctgacctcactgttccttgatttagagattttcacctccaccctgctctccccttccacacactgggctgcattttgcccaactgtgacatctcactgcagccttaagttccttgaccacaatctgccatccttccagctcttccatcggagtacctcattcagacctccagttctctgaacttcccctttcattctggtttcagcagcttcatggcttgctttctttcccctaggttgcatcttactggcctgcctcttcccttcatctcccaccacacctgtccctatggtctttgactccttgtcctgctgctgccctcacctgaccactgcccaaccttggactagtcttgctgtccccagctgctgatgccacgagacttggtgacactgcatgctcaagctgccagatgggcctccagtgttcctcatgcagcctttcatgtgtcctaagttgcgtctcttccattcctcacagtggcagtttcagagtcacctcacctcagccccctcactctcagcagatgctggcctcactcctcaggcatcaggcagggccaccttcagctactgggctcctcaattacaggttttccttttattcccagtcttttctttttcttcagagaatatcatgacctgcttctgaccacagtgtcattgcataggtgctttgactgagtatctccgacttttccagatgtccccgcgcagtgccgggccttgaacttctgcctcttgactgatcttttccattatgcatgaacaggctcaggtgtctcatattcagaaggaaaaagtctgtctttggattgcactcctctcccgagctaccactctttcttcctccctctgttgccacagtcttgatcatcatcactgcctgacttcccaggcatccctccacctgctgcagtctgcctcctgcctccactttgctactgatattgcaccagcagaaattaccagcgctcgaaataacatctcatcctttccattctagctgccactctttgagttcagacttcactctcacctggcttattgtaacagcctaactttccctgcctccaaaatttgtccctaaatcatctccatattgaaatcaaggtgatatttaaacattagaaacttgttcgcgtcccagtctagtggaaagccctcccgtagttccctttattttacaggatcaagtccatatccttagcccagccagagctctcctgcctcacacctctctgcctcagtgcctgtggctcccaacgtgctgtgctgtaggccagccgaacatgccactgttgctgcatgtgtttttagtgcgtgccatccattccctcttattggagtatctctccatcttctccccttgtcacccttgtctttgccctgtaaaaatgtaggagtcaaatgtcatctcctctaggaagtcctttgtaacttttctggcagaattaaatgcttctttcttcatcctttacatgtctgtttaccctgatttctccattttgaggccttagaatatagtaggcacctaataatggttaatgaaagaatagttcaggaagaatacagaggggatccacagagctgaaagggtgagaggagtattcccagtgtagcccgagtgtcttggtgtaattctccaggctctaggctcttttaggtagtgcactggggcccagagggagtttctgtgagtttcagctttttcctttttcacagttggagtccacattaagagagaagtctcaacagcttgagagtcttcaggaaataaagatcagtttggaagagcagttaaagaaagagactgctgctaaggtagtgttttcattagtcatttaattttaaaaagcagggctaagaatgcaggatcacatcttgcttgttgaaaaaaaaatattggtgctttgaagtgtcaccttttaaaaagttggcaaaactgacagcttgtgaaaagaaaaaacttaaacgaattgatctattccagctgggttaaatcttttctgccaggtctggaggcctgcgtcataggctagcttcagatagtaggcagtcagggccattgaccaagcctgggcactgcccagttagaagcactgctttgaaaatgtcattccatttgactgatgtatcaaatcctaagagagattgcatcaaaccaggtttgctgcctaaattttgatgagttccgttagaataaacgtgcatgttgtgggggtagtttcctagaaatggtcttagtgagctgagtggtcagacctgaaagtgcagacagtgttgctgaactgcttgtttttggaaaggctcccacacatcctgctggttttctgtaagagagactggggatagctggggcgtattcactaagtttcctggtggatgcttgactgtggaggttgtcagaggaagtcctgtatgtatccctgttggtgtgacagacaccgatcttagcagctgttttggtgattatcgtcactgtcaccagctgctgggggtgggggagggcagcactttaatccatttcttcctttggcttttcatacccagttcatctcaggacttagagcaagtagtctagatggcctgcacgcttgccctatagataaagagattggtcgtgtataggagtgcgacggatatccacccacctttctgccctagtagtaggtaactacaagttactggatttcctaagtaattcggccctttggcattaatcttcattcaaaacttgtattttttaggctaccgttgaacaactaatgtttgaagagaagaataaagctcagagattacagacagaattagatgtcagtgagcaagtccagagggattttgtaaagctttcacagacccttcaggtgaggcatttggggaaccacatacagagcacgaaggcagttttgggggacagaaccttgccgatccctgacttgaccactggcagtagctagaggtttagagactggctgctcctacctccaccccaaatgtctgactcatcattcaagccagaaacctggtgtgttcttcacacttggcccatttttctttttctgtatgccttgccaattttgcctccttatgagtaaagtactgactccttagcataccatgtaagactcttcccaaccaggcccacccctgtattttgctcatctctctgccttgttttacatgtttaactgcttgtggttcctcgcccacagcgtggtgttctgtctggtaagcatcctcatctcatcccctcctgactcctttctttcaaggctcagcgtaggtctgtcccctctgtggagctcttctaggtccctgagctgggctaaagtgcccctccctctgccatgctccctcgggcactctatgaatgcctgtaatgacacaatgacatttagaatattgtgctaaaactaagtttttttcccaatggaacttcggatttttttttttttttggagacggagtcatgctctgttgcccaggctagagtgcagtggtgtgatcttggctcactgcagcctgtgcctcctggattccagcgattctcctgcctcatcctcctgggtagctgggattacaagtacacaccaccaagcccagctaatttttgtatttttagtagagacagggtttcaccatgttggtcaggctggtctcaaactcctgacctcaggtgatccacctgcctcagcctcccaaattgctgggattacaggcgtgagccaccgtgcccggactggaactgtggattcttcaggattgggagtcaggtctcatttgtctccataatcccaacacattacactttaaaatcctagtctgggccaggcatggtggctcacgcctataatcccagcagtatgggaggctgacatggatggattacctgaggtcaggagtttgagaccagattgaccaacaatatggtgaaaccccgtctctacttaaaatacaaaaattagccgggcatggtggcgtgtgcttataatcccagctacttgggaggctgagacaggagaattgcttgaacccgggaagtggaggttgcagtgagccaagatcatgccactgcactccagcctgggtgacggagcaatactccatctggaggaaaagaaaaagcaagcaagccaggtgtgatggcaggcacctgtaatctcagctactcgggaggctgagacaggagaatcacttgaacccgggaggtggagactacagtgagccgagatcacaccattgcactctggcctgggctggcctggatgatgagcaaaactctcccccccaaaaaaaaatcccagtccgttacacggtagctttggggaattatttttaaaatttttaattgttcttgctgtctccctttgaagtgactagtactctggtgagttaatctgctacatctcagctaaaccagtcaaagttcagaaaatctaggcaggagccacctgtagttatctcaccattgtttctccaggtgcagttagagcggatccggcaagctgactccttggagagaatccgggcaattctgaatgatactaaactgacagacattaaccagcttcctgagacatgacaccctcatggcaggattctagcctgcactttgggtttttaactcatctttagagcaacagtaattattatttaactcttaactgaagaaagagaagtcacaacaaaaggaagactggagaaatgcttacttctagagggagaagactgtgcggcacaggaaacagcaaacagcggggtgatctgcagcccagagaccttcaaatgcgaacactataaactccaggcttgattccaacaggcgtgggatcagatttggtgatggaaaaagcgctgtttccttgcctgctttctccaagacagattttcggaacacatttccctaccctaaagcgacatcccagtagtgtttggaattttctgttcatagatattggaagagagaatttgctttatctgttgtctagagctcatcagtaacagtattcagttagcagacagaagtgtagtatgctgtatgaatattttatattaaaatatgaaggtttgagagcaggccattggctactgactgtattttgttttccttttaccattttatcttatcttgctttggaggaccttaaatgctactgaaacttacctgagaaccataggactgtggcaaacaaaaccaattcatgaagtgaattaatgatgaggatctgaaaacttggctggggctatatatactggaagttgaaggttaaaggaaaagcacaagaaactttggaagcactttttctgcatacttagatgatcttcatgggcccacagggtaccaggataaagccgaactggtaccatctactcttttgaagtgttttagtctagttattggatcagtgaaaaacattagtatacgtttttaaataggctaatttttcaacttggatcattaggcttacgtactacttgtttcaaatgtgtcaaatacaaaaatggtaactaggttgacagatactttgtatttttcttttgaattcagacctggaatgtaagtaagtgacaatgcttatggaaagccagttagttagaattggaaatctgtcttgtcattttacaagcattagattcctttcctgtgtgaagaaagcctcagtgaaacaggtctttgccataactttatgaagtgctacagaaagcacaaagaattgattcatgttcatcaatacctgctgagagtactgtcccaggaatatccagtggatggattcatcatccaggaggttcaaaagtaagatggttttcaaatcatttttgagactggttgcataacagcagggtacctgaaagagccttctgggagttagtgaactaggtagattgttttgttcacataacgccaccatcaacttaaagtgaattgtctttgttataaatgaggtcactatggacttaccctaaagatcttctgtacttctgtcttccataggacaaatgataagtactacatacctcatctcttgggttattattgtagtcttgcattcatggttatgaatttaaaaataaataccaattatggaaatagtactaaaggcttgccgcacatgaaacattattttaattggtttaaagtccctttataaagagtgctacatggtttagataaaggaaacatataactattgagttacaggggattttattaattataaaatgcaatcaatttaaattacgtaggtttaagactagtcccttggataagccccaagcgaatttgtcttcagattattaaaattagtgctgtaaatcagggtgggcaattcacagcctttctgaactgactgaactagagcttgcagtgaagtgttctgctgagactgagcaccttacagatatttttctccagaagatggtgctgggtaataaaatcatcacaattagggaatggttagtggtctctactgtggcaaatgccaactgttggaattcactttattgtagaaaaacccaaactgagactcttaagttttgtttagcaatgtgtttctggtatgaaacaaactactgtgtcactgtccaggtaggaaacaattctttcaactgggttttcagcataaatgggaactgatgtagaaggcaggatttagcccttctaggcaaaagaaaagctcagttgggtttcacgagtgttcctgtgcttatattcagtctgtgcctacatgttctcatgcatgtctaacctgatttacctcttacctgtaacctaccttatcatgtggcttttaattgacagtcactcagccatttctaagcagatatagtagtacctttcagaactcacattggcaagtgtaaaaagatgacttaaggtgaagtgaggacaaaatcacattctgcatactaacctatttttttctccctttaaggtgctaaacttgcacctcatgtccactcagtaacaagtattgggacgtagagcacagcctcactcagctctgaaaggtaatacagcttgtgaggaagtgagccagcagtggcctttgcaattgtggatcttgagctctgctctcagcagatttcaggtgtaaccatttgttaactgtactgaaggtgtgtcctcaagaagaaagtgttcaaattaaaaaagctgctgccaagtacactgtgtggtcttctcctttgaatcctagggttctatccctcttcagagtcatgtttctggtgctgctactttaaaacacagctcacaagaataactaacttgctcaaatatggagaaaactcaatagggttcagggaggttctggcagtgtgcagtgtgaaataatcctgagtccttgctgaacacaactgtaggcttgagttataaagcacattccaaattttaaataaaagcatttactcaattattataaaacaacatatttaaaaagatgaaccacaccaaaggtcatcaaaacacctttttataaattagataattctacctgttttacaatatgggtttaagccttcaatggtgttcagttcaggtgtgagtcagctcctggtggtgtcagaagtttacatgattgcggatatcattgatttgcttcaccatttcccttatatgttcacccctgtaaaattgtaaagtcactcacttttggaattataataaaccatttatatggattcttaagaatttaaactggtaatgttgaaacatctaagaactgctttgctaaaattaacagctgaaggtttcaggtggatagcaatagtgttcactattcatttaaggtggcaaacggtgcaagtactggaaatatttttgaacataattactgtaaaatacctttggccacacaacaaaatcatgttactagaaggtcatccctttcaatcctcccaccatagtcatttcttaagtccctatgtatcatgtggctctcatcccagtaattacttgacatgcaaataccaagattcaggtttctattaagacaggttgattctggcatactgtaaaggaaaaactatctcacgataatagctgattggaagtatttacttactcctctttcaggatggactgaatgcactttcgctggtaggcactgagaataatggtgggttttggaagactcaacaccttctccatcttttgctgttgataatcctttttcatagtaaccttaagtattaaaataatagatattttggcagtggtttgccacacattttcacagtatctatttgaatctgttctttttacatttttgtaaaattttctgtagaataagtgctttaagaaaaattaccaaatttagctagtttggatctattcctacctgtttgatggcattgcccaaatgtcgaagttgatcaggtatcagctgtaattctttcttcatgtctcgctcactatcagagagaactgggagctcagagtgaaaactgtgaagtagttttttcatcctttagaaaaggcaagcaaacatctcaatttaaggtctctactaattaggagaaacataatcacaagctcataattcatgaatctggtgtttctgaagtaggccccataggaagggttaggggagagcctcatgttttccccaacatatacttcagaggagaggcagggggatcagttcagttccgtaggtatgtaagcacctgccaatgcccattttcttaaatatcgttgttagtacctgactaggtaactaaatgttatacagcccactgacctgttcatgatatcctcttgtttttctttagcttcctcatatttgtcagctaaacgctcagccatttcccgcagacttttcctaatgatgtaagacacaagagactcttgaggtccaccccttgatgctgaaaccacctaatgtggctcagcatcttagggtgagaatatggttccagtcttactgacctattgtattcttcttatttttgacacttacctctcttctcgacaataactgagatcttctagttgtttctttttttggtcacataataatttgaccctttaaaaacaaaaagaaatagagtttattcagaagccaggtctaggctaccatacagcatcagctaccagccagggatcgatggtttgtgaacacaggacatcatacctccgctgaatctcctcctttgccaagtcctgtttgagaatgtactgctctctgaacacctgggtggctctgctgaggagctgaaggcattcttcaggaggaggggctatgtccttttcagaagctcttaaaaacaaagtttctacctttattttccttagctgagtaaaacaactgaaaataaatagactcaagtcacaggtgctttttaaactttttatatttttaatttatttatttgagatgcagtctcgctctgtcacccaggctggagtgcattggtgctatctcggctcactgcaacctccacctcccaggttcgagcaattcttctgcctcagcctctcgagtagctgggattacaggtgcccaccaccacgcctggctaattattgcatttttagtagagacagggtttcaccatgttggccgggctggttttgaactcctgaccttaggtgatccgcctgcctgggcctcccaaagtgctgggattacagctgtaagccaccgtgcccagcctaacttgagacgagtctcactgtcgcccaggctggagtgcagtggtgggatctcagctcactgcaacctctgcctcccaggttcaagcggttctcctgcctcagcctcccaagtagctgggattacaggcatctgccaccacacccagctaatttttttttgtatttttagtagagatggggttttgctgtgttagccaggatggtctcgatctcctgacctcgcgattcacccgtcttggtctcccaaagtgctgagattacaggtgtgagccaccacgcccggcctagcctaacttctttttaaacacttcctgtttatcattctcaggtgccacttccctcctgctccccattcactagctgatcaaatatatccagtttcttccaaatttatcacagtaaaaagtatatgaaacagatgaggacagaaaggatgcacagtaattctgaagacagaagagaacccattcataaaaccgctatgcccaaggttgcatacttcaaaaatgctggattggcaacactacgttgcaaaatgcttctaatatgcttttcaaaggaatctggggtttcagccagaacacggaggggagactctgccacttcaacatcttctcgagtacaaagcaggggaggagacgctggatggactgtacttctgcaaaataagtaagtaaattgaattctaccatggagtgatttactgtattacaggaaagcagaaaccacattaatccagaactttcagaatataaaataaagtgtaacttttgtaaaagtgcaagaatgcatgttttccaccttgaaaaggtcactttgggaagctacacccttattattccaatgcccctgatttgtgaaagcatttctgactgccatttccagttcttttctaaaagatcaaggcagcacaaacacctagcatggattcttggcaaaggacttgaaagccagtttataagccggagccacaaacataaattacttatttgttaggtttagagttgatcaaaaccaatattaagccaagaaactgctgtatataccatattggttctatataatttcatttctaaaaactattcagtcaagtgcaaatactcaaacttcaaaaagagcttaaaagatctcacagacttcggcagcatggcaagtgacttactctgaaggcaacaattctaacgtgaatgtttggttgggcgtggtggctcacgcctgtaatcccagcactttgggaggccgaggcaggtggatcacttgaggtcaggcgttcaagacaagcctggccaacgtggtaaaactgtctctactaaaaatataaaaatcagctgggtgtggtggcacacatctgtaatcccagctacttgggtggctgaggcatgagaatcgcctgaacccaggaggcggaggttgcagtgagctgagatcacaccactgcactccagcctgggtgacagagcaagactctgtctcaaaaaaaaaaaaaaaaaaaagtgaaagttcatgaaatagcataactttatagacaacttgtatttcagggagttggcagaaatatgatctgaaagtatccagataattggcctggcacggtggctcatgcctgtaatcccagcactttgggaggccgaggtgggtggatcacctgaggtcaggagttcaggaccagcctggccaacatggcaaaacctcatctctactaaaaatataaaaattagctgggcatgtggtgtgcgcctgtaatcccagctactagggaggctgaggcaggagaatcacttgaacccgggaggcagaggttgcagtgagctgagatcgtgccactgccctccagcttgggcaacacagcaaactccgtctcaaaaaaaaaaaaaaaaaatatccagacaattaatgtttatttttcccctttgggattcatatttattctgaagtaagctagtgtgactaggttttattttactaaatgtactgtgggtgtttaaaaagtatgctgaggtaacttacaggtaattttttctccagtgattttattatttttgtttggtcttgctagcttttagtgccttcagtgtaaataacacaaaatttatatttatttttacatccagatagtacaacttaatcaagcttcaaagactatggaagatcctctaaggacagtaaactactgccagtattaggaatttatgtcagcatccagaggtgcaagctttgaacggacaaggggtgggggtgttgtctagtgtttgaagctccagtgacttttgtttttggtactcatattcctacatttatgtaactcagaatgatcttccagggctgttggaaaaggaacatagtgattacagcttaattatctgagttccttaaaggagcaaagactaagagttcagcttttttgtttttttttttaaaagacacagggtcttgctctgttacccaggctgtagtgcagtggcatgatcatggttcactgcagcctaaaactcctgggcttaagcaatcctctcacctgagcagctaggactacagatgtgtaccaccatgcctggctaatttttttgttttttgtagagatgggggtctcactgttttgcccaggctgatctcgaactctgggcctcccaaagcattgggattacaggcatgaaccaccactgcacccagcctgagttcagctttattccagtttacatagtctacagtgtccctcaggctggcagagatggagaaattaaagagtatgagtatggacttctgagtcaatgagacctgcatctgtatcccagctctatttgttacctgtgacttcagcatttactaacctctcgatccccgtttccacttttataaaatggaaatgacagtgccttccttacagggctgccctgatgattccaggaggcagtgcgggtacgtggcttacttctgagcttggcgtatggtcacagcttgataattattactcatatcgataatggaatttggtattcaattttagtattttttctccacactctgaagaaaagctcctgactctcagctaggtgcaggggatgccagaaactatacctacaatgaaaccttatagagatgatggcaggaacagaaatatccatccttccaaccctcaagtcagaagccaaagtataaaccacacatgtatagcttcaagttggttactgagtgcattttcccaacttagatattgcagaattaacaagagctgtgtggagaatataaaatgggacgtacaataacggccatatgaggcattcataggtactggtgatgcagatcatcgtgggtcccagaatgtcaggtacaatccaaaatcctcgaattggagctggctgcctggaaaaacacagtcatagttaaattacaaagcagcaaatgcaatggaaccaagagcaaagacatgacaggtccgcggccttctcaggcctgggctgaagttgcttgggacatcctatcagtaccataacctcaaaagtggtggcttggaaacctttaatgcagctccacactaaagtctagagcccatgtgactaagtcactcaggaatccctaactgtagcgtgctgctgactgtaatctcaaaagttacacgttacactgaagatctctccaacttgcacataagccccagctatctttgtttgcctagcccagtgctaacaaattaagtgcttagaaactgttgaatgaacagaactaccgagtctctctcaatgaggcccaatgtcaatgtcacaggaaatcacttggcacgcacagcgtgtatctctctcagtcttccttcccacttcagtgaagacactggaaactgagacctcagatgggaactgtcattctgccaacatgctctcctagcggctcccatgcccatcccacctgcatgcctacaacacacatctgcccccgaatgtggatgccgcctcctctcacaccttctgaaaattgtaccatcaactgtgtcgtttcaaaatctccctattatctacttcccctcagcttgcaaactcatgtctcttccatttaaaatactctcatttcaatataatgtccagttccccttaacctattctttctcgccatccctttagaaccagcagtctttaaacagcagttgaaaacactagttccccttccatagctcccatttacctttttggacaagacatggagacgatatctggaaggttgtaaactttaactttttattatcagtgtgaaatctacacactactgggctatacactatgtaaccagtatccaggtcaagaatcaggacactgcagggggcctcagggttcccatgcgaccttccctggtcatagcctttcactccccagagaagtagccgctactctgacattcataatatcatgtctttgctttgctttatagttttcctatctatgtattcactcctaggcaagactgtttaattttacctgtttctgaaattgatataaatgggattttggggtttttttgagatagggtctcactctgttgccgaggctggagtgcaatagtgcgatcacgactcactgcagccttgacctcgtgggctcaaacaatccttccttctcagcctcctgagtagctgggaccacaggtacatgctaccacagtggctaatttttttttttgtttgagacggagtctcactctgttgcccaggctggagtgcagtgacatgatcttggctcactgcagcctccacctcccagggtcatacgattctcctgcctcagcctcctgagtagctgggattacaggtgcccgccactacacccagctaattttttttttgtattttagtagagacggggtttcaccacgttggccaggctggtctcgaactcctgacctagtaattcgcctgcctcagcctcccaaagtgctgggattacaggcgtgagccaccacgcctggcctcacctagctaatttttaaatttttttgtaaagggtctcactatgttgcccaggctggtctcaaactcctggcctcaagtgatcctcctgcctcacctgacaaagtgctgggattataggtgtaagccaccatgcccagcctacatgggattttattatgtattttccttgttcacttttctttttttttttttttttttgagatggagtctcactctgtcacccagactggagtgcagtggcatgatctcagctcactgcaacctgtgctgcccgggttcaagcaattctcctgcctcagcctcccgagtagctgggattgcaggtgtctgccaccatgcctggctaatttttgtagtttttagcagagatggggtttcaccatcttggccaggctggtcttgcactcctgaccgtgtgatccacccacctcgatctcccaaaatgctgggattataggcgtaagccacagtgcctggtttcactgttcacttttcaagctggtacagtttgctatccttctcattccccaccaagcgttttccctgtggtcctctgtattgccaaacctagattatgtctatttcttagtgtatgctatttgtctcatgtctgtgtatactccatgtctaacagagtgcttatgagatatctagtaattgatgaacagaataaagggaggtatctagaataccttccaggtttctactggggataactggggtgatatggcacccttcagaaaaatgggacacaggagagagagcagatttggaaagacagaagatgagttaaggggacatctggagttttatgttcctataggatatccaagtggaggagcccagtaggcagctgggtatgtgaatctggagttcagagtggtctgggctagggcgatatggatgcgggaactgtcagcactgaagccatgattacggcagaagttactcaggaaaggacctagaaagaatagagaagacccaaggaaagagttgtgagcattacttataagcagtgagtagaggcagaggaacccgcccaagaaggaaacttgagaaaagggctgctggcgggactgaaggagaacctggagggacagacgtcaaggatgccaaggagaatgtgtttcaaagaggagacatgggcaaccacatcaaataaacacagcaatgcagtgaagggcagacacagtctctgctctcatgaaacatatacattccggtagtggcgacagacattaaaaaaatgcaaatataaatagtgtaatatgtgctacaatggataagagaataggagagccccaagttagactggggagtcaagggtgttctctgtgaagaagtgacattaagatcagaaagaagggtaggagttagccaagagaagacagcaagctggggctggggctggggctggggaaggaccttccagtcaggaaacagtatgtcgagtggccctggagaggagaaagcttctgatgagcaggacactcttaggggagaagtatcacgtctgcaactttcaaatgactcagcagtgaatactgtggatgtgagtgtaacggatacaaacgtatctgaactgctgaaatgaacaattgttttctgatatacaagggagggagagtccttacctgcagggcaatggcttcgtacaaaggatgtgttcaacaaagcatttctgttctgtagagagttcctgtaaactatccttatcttcttcatctaccatggaagacattacataaatgaaatgatgcttagacaagtctccaaattaaaatgctaatgatattgggttaaatgcagtgaggttcttgtctgaaaacattgcttctcaagtactatgcttttctgacataggcatacgctttcccagggggtctagatttccgccccaagaagtaggattttccttcgtaatgtctctgaatgcaaaaatgtttcactaagaacagtgaaatcattctcttctagggtgctgcttacccacactgattttattttcataaaggttgagtatcctttatccaaaatgcttgggatcagaagtgttttggatttcacattttttttttggattttggaatatgtgcattatacttagtagttgaacatctcttatctgaaaatctaaaatcctaaatgctccaatgagcatttctgttgtcatgacagcactcaaaaacttttgtagctcactcaggttcaaggatggaaaaaagaaaagttttggatttcaaatttttcagagtagggatactcaatttataacagctttatttttttttggatggagtctccctctgttgcccaggctggagcgcagtggcccaatctctgctcaatgcaacctccggcttctgggtttaagtgattctcctgcgtcagcctcctgagtagctgggactacaggtggacgccaccacgcccaggttttagtagtagacagggtttcacggtattggccagactggtctcgaactcctgaactcaggtgatctacctgcctcagcctcccaaagtgctgggattacaggtgtgaaccaccacgcctggcctgtaacagctttttgaaacgtaattcacagtaccatacaagtcatccatttaaagtatacccattaaagtatacaattcagtaagtttttagtgtaagaattgtatacctggcagggtgcggtggctcatgcctgtaattcccagcactttcggaggccaaggtgggtggatcacccgaggtcaggagttcaagaccagcctggccaacatagcgagacgccgtctctactaaaaacacaaaaattagctggacgtggtggtgggcacctgtaatcccagctactcgagaggctgaggcaggtgaatcgcttgaacccaggaggtggaggttgtggtgagccaagatcatgccattgcaccccagcctgggcaacaagagtgaaactccgtctaaaaaaaaaattgtatacctatcattaacaatttggaatattttcatttccccaaaagaaacccacataaccattagcaatcactcctcagtttctaccaaacttcccagacctaggcaactaatctactttctgtctctgtacatttgtctattctggacatctcatataaacagccatacagttgtttgtaactggcttctttcacttagcatctgttcacagttcatccatattggagcatgtatcagtacttcattccttttcattgttgaataatactctgttgtatagacacaccacattttatctatccattcatcagcttatggacacttgggtatgtggcttctgggctatgatgaataatgctgctgtgaacactcatgtaccagtatttgtgtggatacaggtcttcatttctcttggaaatatactcaggactggactatcaggtacatggtaactctatgaataatcatttgaggaactgccagattgttttccaaagactgtaccattttacatttctataagcactgtataaaagtccccattttttcccacatcctcaacacttgttaatgtccatctttttcattttagctatactagtggatatgacgtgatacctcattgtggttttgtggtatcttatttccataatgactaataatgttgtacatctttttatatatatgctatttgcccaactgtatcaaatgctaagggttctttatattgttctccatacgagtccattatcacacaaatattttctctcattttgtgggctgttttcccttttgtaatagtattcttgaagaaaaaagatttaaattttgatggccaggtgcggtggatcacacctgtaatcctagcactttgggaggctgaggtgggtggatcatttgagcccacgagtttgagaccagcctgggcaacacggtaaaaccccatctctacaaaaaacacaaaaattagctgggcatggtggctcactcctgtagtcccagatactttgggggctgaggcaggagcactgcttgagcccaggagttcgagactgcagcaaccaatgactgcaccactgcactcccacccagacaacagagtgagaccctctgtctcttaaaagaattttttttttttaaatagggacattaccttggattatccgggcagacttaatgttaccacaagtttctttaaaagtgaaacagagtgatacaacatgaggactcaacccagcccactgttgctggctgcctttgaagatagaggaagagactacaagccaaggaatgtggcaggagctgaaaaagggtaggaaatgcattctaccctagagctttcagaaaggaaaactgctgtgccaacttaagcccagtgagaaccatgcaggacttctaacctacaaaactataagataacaaatttgtcatgttttaagccactaagtctgtgatgatttacaacagtagcagtagaaagccaataacggattcagtctttttaccattaagcattgtgttggttccaagttttttgtagatgaaaagtttcctcactagtttgaggaagttcctttctattaagtttgttgagtatttttaacatgaaaggctgctagattttttttaactgctctcactctgtgaataattggtattaattcttttttttaatttattttttattttcatttttgagatggagtcttgctctgtcacccaggctggagtgcagtggtgtgatctcgactcgaatacagcagtctctacctcccaggttcaagcgattctcctgtctcagcctcccgagtagctgggattacaggcatccgccactatgcctggctaatttttgtatttttttttttagtagagacagggtttcaccattttgaccaggttggtcttgaagtcctaacctcaagtgcctcggcctccaaagtgctgggattataggcgtaggccactgcacctgaccggtattaattctttaaatgtgaatccatgtggtcctcagcttttctttttggatagttttgattactaatcaatctctttgtgtcagtttttgtttgtttgttttgagacggagtcttgctctgtcacccaggctggagtgctgtggcacgatatcggctcactgcaactccgcctcctgggttcaagcgattctcctgcctcagcctccagagtagcagggattataggcgcacaccaccatgcctggctaatttttgtatttttagtagagacggggtttcgccatgttgactagactgttcgcaaactcccctgacctcgggtgatccacaagccttggcctcccaaagtgctgggattacaggcgtgagccactgtgcctggcctaacttttttttttttttgagacagagtctcgctctgtcgcctgggctggagtgcagtggcatgacctcggctcactgcaacctccatccctggttcaagcgactctcctacctcagccttccgagtagctgggactacaggtgtgtgccaccacacccagctaatttttgtattttaagtagagacagggtttcaccatgttggttggccaggatggtctcaatctcttgacctcatgatccgcccgccttggcctcccaaagtgctgggattaaaggcatgagccactgcacccagccttttttttttttttttgagacggagtctcgctctgttgcccaggctggagtgcagtggcgtgatcttggctcactgcaagctccgcctcccaggttcacaccattctcctgcctcagtctcccgagtagctgggactacaggcgcccgccaccacgcccggagaatttatttttgtatttttagtagagatggggtttcaccatgttagccaggatggtctcaatctcctgattttgtgatccacccacctcggcctcccaaagtgctgcgactacaggcgtgagccaccgcacccggccttttttttttttttttttttaaagcaaattatcccagaccctgattgagtcagttttggtagtttttttttttcttggaatttgtccattccatctagattatgtaaatggcatacatttgttcataatattcctttataatcttttatttctgtaaggtcaatagtaatatccctgcttttattcttgattatagttagtctagctaaaggcttgtgaaatgtggttgatcttttcaaagaacctttcggtttcactgattttctctatcatttttctattccaaactacttttctgaaatctattaaatctatttttcctctgaaatctattaaaagtgcagagagttagtaaactcacctgatccaagaaatttgtgaagtttatgaatccaagttagcccaacactatgtacaccagcttcatgagtacagtgatatcttgaaggacacttgggatctgcaaatggaatgattaatgatacaaaggtagccagtggataactaaaaaaatttacctcaaatttgttggctactccacattagcctacaaacgcatttgttgatggaaggttttataaaagactttcatattgttaggggttttgaaattttaaaatttgaattcaaatttcaaatatattttaagtacagatatacctcagagatactgtgggtttggttccagaccattgcaataaagcgaatacagaaataaagtgagtcacacaaatcttttggtctcccagtacataagaacgttatgtttacactatgcagaaagttatgtttatactagtaggtacgcaatagtgttacgtcaaaaaatatgtacataccttaaccattttttattgctaaaaaatgctgacacagagacagcacgtgctgtttgaaaaatggtgccgatagacttgcttgatgcagggttgccacatctttcatttgttaaaaaaaaaaaaaaaaagcactgtgaaccacaataaaatgaggaggtatgcctatgttttaaaaagtataaaaaatggctgggtgtggtggctcacgtctgtaatcccagcactttgggaggccgaggtgggaggatcacaaggtcaggagttcgagaccagcctgatcaacatggtgaaaacccgtctctactaaaatacaaaaattagctggccgtggtggcatgcacctgtgatcccagctactcgggaggctgaggcaggagaatcacttgaacccgggaggtggaggttgcagtgagccgagattgcgccactgcaatccagcgtgggcgagagtgaaactccgtctcaaaaaaaaaaaaaaaaaaaaaaaactcaatccaaatgttattttctaaatatgaacacaatgaggttcaccaaaacataaatacttgctggcaagtaactcatttatgcttttctctgtgcatttatttagttcttcaaaagaaaatggtggttaaaatagcagctctgtagaaaacctatgcttatgcttgcatacatcgacttaaataaaattgttgaagcaaatgcacttctacagcatagttatcacaaaagactttaacacaacggctcagggaacagttctatcagtgtagtaaggtgtgaaatgagaagtgaagtttcgtatgtcttcataatgttgacttacagatagtttcaaaggttattttcagttttggatgctctttttgtttgacaatcatttataactaagaagtatgagtagttgttatacaattttaattaactgattttgaaacaaaaatttctgtacctcctttgagccccagtatcagtaagacaatcctgagactaaaagataaactactgaatacctattattatgtataaatatttatctctgtaactcaatatttttattattaatattaataataatcttattggccgggtgtggtggctcacgcctgtaatcccagccctttgggaggccaaggtgggcggatcacctcaggccaggagttcaagaccaacctgaccaacatggagaaaccccgtctctactaaaaatacaaaattagccaggcgtggcggcacatgcctgcaatcccagctactcgggaggctgaggcagaagaatcgctcgaacctgggaggtggaggttgcggtgagccgagttgtaccactgcactccagcctgggcaacaagagcgaaactccgtctcaaaaaaaaacacaaaataataatgttattaaactaaaacaaaatacagagataaggtatatattaaagctgataaaatggcaacaataacccataaaacccctaaattaaattttcctttaatctaacagtctcactttgtggttagtgactttatcataaattaatattctaaagctgatatattatttttctgtcttatatattgaggttccataaaacatcttagaaaacagcattctgctataaaaagtttaaaaaaccctcatctatgggaatcatctgtttgcataattaaaatattgaaaattttcttttcatttgcgtatgttttaagacttaaggctcaaatcatctcattaaatctaacattgttaaaatggcttttcaaaacctgtagtgctaacatcaacagaaaagtcttaacactggggtgtaaaacaaattgattactaaaaagagccaacatttacttaacaggaaatttgttagataccaccctatgctatactgtagccatttcactttgtcactaagaaatctggtgtgcctcagtgattataatatgccttgttcagcacaattaggaacaagtcaaaaatttcttagtttcacatatgaaaatgttactctcattagaagaaccaagaaaaggctgggcatggtggtttatgcctaaaatcccagcactgtgggaggccaaggtggacagataaggagttcgagaccagcctgaccaacatggtgaaaccccatctgtactaaaaatacaaaaattagccaggcctggtggcgcatgactataatcccagctatttgggaggctgaggcaggagaatcgcttgaacccagggggcggaggttgaagtgagccaagatcgtgccattgcactccagcttgggcaacaggagcaaaactccatctcaaaaaaaaaaacaaaaaacaaaatacaaaaaacaaaacccaagaacaaaacgtccacgtctacacttaagatttcccaaagatatacgtatctatatgaggaaaccaattagtttatgtcactttacttcatttggtctgtttcctcatctataaaattcttagacaatataaatctcaaaataccttaattagacaaacccaatgtacactctttgctggtttgttatgtaaggaattctgcccccttaaatgttttgcctatactttagtacagagttgaggccgttattaccagaactaggcaaactggctaacaagaactgtaaggagagtaggtcaaactgctacaagattgaaatcctcctatgttgcagtgaatgacacgatttcattcttttttaaagccaaatagggctgggcatggtggttcacacctgtggaccagcactttgagaggctgaggcagaaggatcactggagctcaggactttcagcttggacgacatggcaaaatcccgtatctaccaaaaatacaaaaattaggcgtggtggtgcacacctgtagtcccagctactccagaggctgaggtgagaggattgcttgagcctgggaggcaaagcagtgagccaagatcacgccactgtactccagcctagatgacacagtgagatcatatcacacacacacacacaaaagccaaatggtattccactgtgtatacaatgccacattttaaaaatccatttggggccaggtgcgcggtggctcacatctgttatcccagtacttctggaaggccgaggcaggtggactgcttgaggccaggagtttgagaccagcctggccaacatggtgaaatcccacctctactaaaaatacaaaaattgccaggcgtagtggctcacgcctggaatcccagcactttgtgaggtcgaggtgggcggatcacaaggtcaggagttcgataccagcctggccaatatggtgagacccccgtctctactaaaaatacaaaaattagcagggcgtggtggcacatgcctgtagtcccagctactagggaggctgaggcagaagaattgcttgaacccaggaggcggaggttgcagtgagctgagatggtgccactgcacttcagcctgggcaacagagcgagactccatctcaaaataaatgaataaatgaaataaaaatataaaaattagccaggcatggtggtgggtacctgcaatccagctacttgggaggctgaggcaaaataatcgcttgaacctgggagatggaggttgcagtgagtcgagattgcgccattagactccagcctgggtgacagagccagacaccatctcaacaacaacaacaacaacaacaaaatccatttggtctgtcgatggacacaggttgattcagcatcttagctgttgtgaataacactgcaatgggcatgggagtgtaggtatcccttcaacctattatttcctttccttttgacatacccagtagtggaactactgaataacatggtagttctacttttgaaaggaccaggaaaaattcactattaggaatctggtgatctggaccaaagaccactattttaaaacttgggaaatttgctcagtctgccttagacaaaaagtgtactatagtgactaaaaagctaaaaaaaacccagtcaactttttaaaggctggaaccacagaacaaatacattacataggaacagtctatgatagtcttagtataaaaatcatgggaaaaaagcactacatttattgaagagcttacctctatgaagtttgactggacaagaaaagtcagaatcaaaagggtcatcctctccagatgccagtttcaaagcaagctccaactcaacacattcaaacacatacagagaaggaatgaggtcaatcctggaatcccaggacttttctgactgtaaaaaaaagtgttgtaattttgatcttgcatgttaatttgaaaatgtacacaattaaaaacaggcaaaaagctgggtcagggccgggtgcggctgttcttgcctgtaatcccagcactttgggaggccgaggcaggtggatcatctgaggtcaggagttcgagaccagcctggccaacatactgaaaccctgtctctactaaaagtacaagaaatcagccgggcgtggtggtgggtgcctgtaatcccagctactggggaggctgacgcaagagaatcgcttgaactcaggaggcagaggttgcagtgagccgagatcacaccattgcactccagcctgggcaccaagagcgaaactctgtctccaaaaaataataataaaaaataaataaaaaaattgaaaaaaaagctgggtcaaacagtactttcaaattcttaattccacctctatcctaacagtgcactgttattctgaagacaaaacgtctctcttcctttaggaagatgtttgtgaaaaaagccaattcagtgattccaaggctctttgtatctgtccctgaagattgcaatatagagaccagaaagtaacatgcagactggtggaccaagtaagttgggcaaccttctaacttctttccacttagactgctaagtgtgcttcagctacttttttaactgtttaatttccaaaatatcagaagttccataagtaagttaaaattccttctcatatattaagcattcatattgggtcaggaactatgccaggtgttgaagatacaaacaaccacagcagcctgcacttaccgtgtggtcatcttcttcttccccttctagcacgacacagtgatacagcattcctgattcagtagcgatcactaagatattggggacacagggtaagcagagtacagcacacgcatcataaccatagttatcttcagccgcaggatgcatgggcaatggacccaacagctttccaatatttccagggctaaagaaggagtaaaaacatatttgggaaatgttgacagtatgcatgctcatcccataaaaccattctttgactttgttttcctccagctatcataccttcattataaatgtagtgtattcccaatactccatcttctcgctttcccactcagatcccaccactctgtgtttctcaaccagagataattttgccctagcggacagtggcaatgtctgaagacattttggcttgtcacaactggttgtcacaatgtggggggaggtattagcatctagtggttagaggctagacagaagccgctaaacattcccgcacagcacagcacctctaaaacaaacaataattcagaccaaaatgtcaatagtacaaaggttgaaaacccttgccctaaatttactatggtttatgctttcaccactccactgaagctactgtggcaaaggtcacctgtgagatttgctaaatccaaaatgcacttaaccttctgctgcatttatcactggttaacgactactgctactcaacagctgtaacaattctttcttgtagttctctcttcctacctctttaaacacaattttctaacgtccttttctaatttctgtctcttaaatattggtgttctccaggattctgttgtatgctttgacttttttcaaaatacacacttaaatgagagcctgttaaactatgcctcgttttaactaccatctatattcaaagactaccaaatcctttcttctaaaatgtagcttctcttcaaggctttggatccccatattaaatttgatttgacaaatacttattattgagtgctagatgatactcccagtgaatgatggtttagttgatgaggcagacatttaaccagaattactataccatgtgataagtgcaacaacagaaggatttatggtgtacaaaggaatgacaaaaagatacaaagataatgaagaaagctataaaaaataaatgagaaaaatgagaaagaatgatttctgggaaggggattgttgagcattccaagctagagatcagtttatgcaaagtcctggaaacatgaaagacaaagaactaagaacaagaaaacttatttagtatgatgggaggcaaagtacaaggtggaaggcaacggcaaaatagctagacagacatccaggactggcttatgaagtacacagtcttgtgtgctatgttaaactatttgaaatctatctgccgggtaacagtatatcactagaggtttaaatcaagcgatggagcctcactttacaaatcagtctggtattagggaggaagacatggaagggtccaaaatgggatttggggaaactatttaagaaaataagccaggcagatggtgaagtaggcagatgatgcagttctgaagcagggacagaggaatgcagagaagggtgtataatcaggggtgtccaatcttttggcttccctgggccacactggaacaattgttttgggccacacagaaaatacactaacaatacgtgatgagctttaaaaaaaaaagaaaagaaaagaaaatcgcaaacaaatatcataatgttctaagaaagtttacaaatttgcgttgggctgcattcaaggctgtcctgggctgcgcgcagcccgtgggttggacaagcttggtgtatactttcgaaaaatttaaatcacaaaatcaatagaaatttgggactgatgaaatgtaaggatgaagaaaacttttgggttttgggctaacgttactaggcagatcatggtttggacaaatgagggctcagcagcaagaggagaaagggtaagggaaggtactaaagttaccacaaaatcctcctgagatcatgtgtgaaaggcagagaacatttctgccaaggagaatgcactcaacagtgaatcctcaccattctgtaacctaccgagctctttcatctttctaatctttatggttttgcgtactctcttctctctcctgtacccacttctgattctgtctagtgaatccttcaagttcaagcttttgtaatagcatttccttaaagtcttccaagatgagcaggcctactcatttactccatcacactcctgaagaacccggtgatgccctgagcacatgacactgtactatagttactggtttagttgtatgcccttctggtagttaaggaaccacatggcaggaaccttgccttcaatcttgtatttccatcttctgccagagtgggtcctgaataagtatctgttaagtcgatttacaagcgaataaactctaatgctcagcccttagccttatgcctctgcagttttccctcaaattcttatcctgtatagactctctcaccatgaaagatgattctcatacctctattttaattcttcttgtctgtcatcatcctgtatttccaactgtccatggaatatttccattttattggtccaatactatcttacactgatttacttagaaataaatcttctcccccaattagcagcctttactgacctgtttctgttcatggcatactcccttatccaaacagtaactaagtcttatttatccttcctttgttgttatctactgtgtttcatttttccctctgttctattaccacccaagttcaaactctcataaatgacaagctcaattttgcaaaagcttctttaaaagtctctgtcccagtcccctccctaaccaattgttttgtccttctgttcagaaaccatcactggcttcctactaccctattcctacagaaaaaaaacccacactcactcttttaacgaggtatttttaattccagcaaattttctcgggacagatactccagctttatcacttaatgctccctacatgaatcctcagctctagcccagaatgtctaataaattaagcttgaatgacacttgcacttgcttattttcagacgctactttatgctgcccttgacagaaatggtctcactcttccttgatacttcatttaatcctgaatgagacctttaagtcacacatgacaccactccttctctacgaaaatttccttaacctcccagtcagaatgatctctccttcctcggggttcttactgtctgtgtaccaatactgtggtatggatagtattttttcatgtgtatgtatctttctccccacaactgggacataagataccagattaccacgcctacgtggtgtcttgttcatataagataaacaataagcacttgttcggataactagaatttgtgaacacaaatccaggcctatcataagtgattatccaagaattctatagaacttacccaaataatatgaagaaatgaaaggccaaatgacctgtactaactctttctcaaaaatatgcaagccaagcatgtgaaggctgcaacatttccacagactcaaaaacatggctcccaagtccagcctcaatgatatctactggagcccaaactgagttttcatttcaggtgggtgaccacctcaacttacctgtgtaacagactgatgtatgtcaggaaagtctctccattttcatataagatgtacagtgggtatgccactacttcatctttgccgttttgtccaaatagagtctttgggactgctgccaatggcccaaagtcaaatgcaactgctgtctctcctagagatgcggtatacgcccttctggaaagagatgtaaaaaccaacttgttaaaaacaaaaacaacaaaaagtaaaaagaaaaacaaaacaaaacaaaaacacaaaatgtctaataacaggaggtgggtatgtatggaatttgtaggcaatggactgaaaagacaaaaaatgattatgaagaatgttaacatttaaaaattctcagctgggtgcagtggctcatgcctgtaatcccagcaatttgggaggccgaggtgggtggatcacctgaggtcaggagttcgagaccagcctggccaacatggtgaaaccccgtttctactaaaaatacaaaaattagttgggcgtggtggcaggtgcctgtagtcccagctacttgggaggctaaggcaggagaattgcttgaacctgggaggcggaggttgcagtgagccgagattgtgccattgcactccagcctgggcgacaagagcgaaactccgtctcaaaaaaaaaaaaaaaaaaaaaattctcatgaaattaagtgaaaaaagctggccataaaattatttggttctactctcatcttaaatagtttaaatacacagatatacaaatagcaaaaatttattatatacacacacataaatgcaaaaaggaaacaggaaaacacatgaaaacatcaacagttgtctctgagcagcaggatccgtaagttctacaaatactcgcaaagcacctactctgtgccaggtacttttctagggtctgggaatatgtcagtgaattaaacaaatgtcctgccctctagagagagaaataccacaaaaagagaagaaataaagatggaacataaactcagaaaatatcatgaaaaataaagtagggtaagagggtattgatggaggtgctactttagactacttggtataggaaagactctgataagatatttgagcaaagatctgaaggaagtaagagagcaagtctgtggttaactagggaaggagcagttgaggtggagagcaaatgctctaaggtagaagtgcttaatgtctgtggaatggcaaggaggccaaggtgcctggagcccagagagccagggcacagagggaggaatgaagctggaaaggcaatcaggtggcatacctgtggaccctttataggtaaagactctgggaaatcaatggggtatggagagcagggaagtagaatgatctgattaaactgatctgattaaacttagattaaagtagaatgatgtgattaaactttgggtgctgtattgaaacaggctatagctataggagattacaaagattttcattttcttcctaatactttgatctatttttctcaattttctacagcaaatatacattacatgtatatcaagaaggcaaatcataaaaccatgctgtttttatatttaaaatttactgtagttattcaggaagattctagttcaatacaaagttaacaaatatggttaaaatgaaatcacaatttcatatagttgagagagcaaacatcaatgcaagatattatcttagtttctttatcacatagaaaggtgataaagaaatgaatggtggctcaggcctgtaattccagcactttggggaggctgagacgagcaggatcacttgagcctaggagttccagaccagcctggccaacacgacgaatccctgttctactaaaaatacacttacttctcacattaccaaaagcatgctagtcacctctgaaaaaccttgcaacctgttaaaattgcatttataatcccaataagctaattaaaaaaccatttcaagactcaaataaaaacttaccctttattgagtactagactttcctcttcggcttctgaaagtattatcacgttagtgggtgtctgcggctcacgtagtgagtaaattctagcaaccaaaagagaagaaaaccagcacttaaaattctgttttcatttcccaaaactgcactttcctctccatctagtcagttcttgagaattttctaacacttatcacaactatttctttgcaaaaatcttgctgttgcaaagtagtctagttcatttattctttaactacataagggagtttcattggggcctgaagaaatgttctctatccttaccaataccctttaacagcctattccataacatcgcacctctgtcacttccgtcctgagcccttagctatactcgccttgtccagtcatctcactattgcccctaagcttgccagttttccttcaactacacacatctatctctgcctattggacaccaaatcccaccagagaaagaactgtatcttattctttatatgccaactggctgacagagtgagtgatatttagcctgcaaatctacttatgtgtttgttatataaaaacccaatattggccaagcacggtggctcacacctgtaatcctagcactttgggaggccgaggtgagcagatcacttgaggtcaggagttcgtgaccagcctggccaacatgatgaaaccccgtctctactaaaaatacaaaaattatttgggtgtggtggcacacacctgtaatcccagctactcgggaggctgaggcaggagaatcacttgaacctgggaggtggaggttgcggtgagctggaggctggagtgagccaagatcacgccactgcactccagcctgggcgacagagcgagactccatttcaaaaaaaaaaaaaaaaaccaaacaaacaaacccagtatcgtatcatctctattttcaagggaaagtataatactgaatttttttaaccaaaattattttaatttaaagtaacctacatttcacagcatataaggctattgtgaaaaagggaattttcaaaaggccagtaatgtcattttagaaatccagtgtcccttataatcacttattttgtctgacgccactaagaattttttaacttggtttcttccaatatcaataaaatgccacattaagtatttaataaatttttaatgataacttgatccatttgaatacacatttattacagtcttcctaggttcctacaagcgttactaacttcaaaatacacataaatactaggcaataatgttgtactggggaacagtgaaagaaaaagaaggtgcaacagggcattcggtgaaaatttccttttgctctgaaactgcccaaaatctccaaagcttaggaaaacagaagtgttaaataccacatattttaaaaaagaaccttcaatatttggggccagatacttcctttggggcttaagaactgtacctatgctatcttcccaccatctccttttccatcatagcatataaaaggaagactaagaagagaggatgtcaaagattccttaggagtacagtataatgtttgtaatgggaagattttccctctcctctttctctgccctgaactctaaagccaaatgggtgggcagggaaggctctaggaaacagccagatgtggaggtacctgtaataagggagactggtgcatttcctagctgaatgccccttagtcacttagtagctgtctcagttataagatcgaaaaaacatagcaatacacacgtatcacgttcagtactatctacagtttcaggcattcactggggggtcttggaacacacaccctgcagataaagtatactgtaccccatcttgagagaagattcagggcatagagaactgacaggagccaatgggagccagagctcctcagtgatggggggagctggaagttcaacactgccctccaacaccaccccacccccccacatacacacacacaaacacaccatctatgcagagactaccacatcaacagagttcactagtgacagatggaacgagattcaaacaagatcaggcatacttccccatcactcacaggctaccagttcggtaagatctctacctcacctgtcccactcccctaccccacactgaaggagttagatttggaggaaggagggggcagcccattccttacacttcaccctatgttccaaagtgctgggataacaggaagagtgaaagagcagaccgcacactctccaatcacttctgatcccacaaaacacaggtctgacctacaaaagggccaggacatagttgtgaaagatttgagatcaaatagctttcgacattcttattttctttagacagggttttactctgtcacccaggctgcaatcttcctacctcagtctcctgagtagctgggactaccggcacatgccattatgcccagctaattttttttgcagagacaggatctcactgtattgcccacattggtctcgaactcaggggctcaaatgatcctcccacctcggcctcccaaagtgctgggattacaggtgtgagccactgcaaccagccaagatgagttttaaactggacacactgttttcataactagaagtaacgagaaagctatggggatctgtataagacatcattaaggggtgagtcattcagcagtgaaggaagatttagtagagcacagttaaaagcagtgattacgaaaaataaaactgaaggtatctgtacctctgctgagtccccccaataactttttacataaggccgatccagaaagttagctgataatagagtagaaatctacgtagcattagggcatttaatcatagagtgcaaagcttggaaggggcgttagaaactattgaatcaaacctgctcaatttaaaagattggaaactgagccccccaacccctaaaaagctcaagatctcaaagataacagaaaaggaggtgggacaataattcaaatctctaaatttacacttacattctctttcctttatgctacattattaccaaaagggtgacaatgatgaaagagttttggaaagattattctaaggtgtcagattaggagaggagatacctggaggcaggaagactagttgagaaggaatagtggtaagttagagcagttaggcaattcttatgattgagaatgggttacaacagccatccaataaaagcactgactcattcaatgactcacttcgttctatgttgagctgttaattggcaaacagaaacagagctttcccactcgcaaggcttcaagagagagaaataaaatttacctgattacgttgtctgatgttaacagcactacgtggggatccaggatttcacttggataccatgcagcatgctttagagtcagagaggtggaactggtgaaaaatctctccgcaactggagtggtactaaaataaagataataattttccaaaacattttgtacaacttggatgaaaatcttctaaaggaacttcttttttttgcagatggagtttctctcttgttgcccaggctggagtgtaacggcacaatctcggctcactgcaacctccgcctcccaggttcaagtgattctcctgcctcagtctttcaagtagctgggattacaggcacctgccacctcgcccagcgaactttgtattttcagtagagagggggtttctccatgttggtcaggctggtctcaaactcccgacctcaggtgatctgcccacctcggcctcgcaaagtgctgggattacaggcatgagccaccacgccaggccctgaagaaatttctattttaacactctttgattctctttccttcagatttatttccctgaaatcatgctgagaggacattcaaggcatctattcaatcaatatcaaagaattgaaataaaaatatcttctaaattatagcacactggctgggcgcaatggctcacgcctatcttagcactttgggaggccaaggcaggtggatcacctgaggtcaggagtttgagaccagcctggccaacatggtaaaaccccgtctccactaaaaatacaagaattaggcaagtgtggtggcacatgcctgtaacccgttacccgtgaggctgaggcagaagaatcgctggaacccaggaggtggaggctgcagtgagctgagcttgtgccactgcactccagcccgggctgaggaggttgcagtgagctgagatcacgccactgcactccagcttgggctacagagccagactctgtctcaaaataaataaataatttatttattttaataatttaaattatttatttaaattttatttgtttatttatttgagatgaagtctcactctgtggcccaagctggagtgcagtggcgtgatctttgctcactgcaacctccgcctcctggatttaatcaatacttgtgccttaacctcctgagtagctgggactacaggcgtgtgccaccacaccccacttattttttgtattttagtagaaatgaggtttcaccatgttgcccagggtggtctcaagctcctgagctcaggtgatccacctgcctcggcctcccaaagtgctgggattacaggtgtgagccatcgtgcctggctccaaattatagcatatttcatacgtatatatacattttaggatggtttgacttaggattgatacatatttatacagtacaagtgttttcagatatagtatctcatttgatctttttactaaccctgtaaggaaattacaagggcagatattatcaatcctatttttaaaatgaggaaacagatttagaaggtaaacagtttaaggggactcaacttataagttgcggagctaaaagcagtttctaccttatacagatgatccccaactttacaatgggtttaccagtacataagccaacataaactgaggagctccttacgacttatgatggggttacccatcataatgttgaaaaatcctacgttgaaccatcctaaatcggggatcctctgctgtgttgtcagcaataaatccattttcaacttacactgggtttatcgggacataacccaatcgtaagttgaaaagcatctgtactcttttcagtagatctttcagattcacttttctggatttgttgaaaaagaaattatataaaaataggccaggtgcggtggctcacacctataaccccggcactttgggaggctaaggtgggtggatcacttgaggtcaggagttcaagaccagcttggtcaacatggtgaaaccccgtctctactaaaaatacaaaaattagctgggcatggtagcgcttgcctgtaatcccagttactcgggaggctgaggcagaagaatcgcttgaatccaggaggcggagcttgcagtgagccgagattgtgccactgcactccagcctgggtgacagagcaagactccatctcaaaaaaaaaaaaaaaaaaaaaagtatatatatatatacacacatacacacacacacacacacataaaatacttacacttctggcaaacttctggctgacagataactggttttacaaaatcttacttctacctaatcgaaagaatggcctagcctcaaatgagacagcaacgtggtacttcaggcagaataaagtacaatcaattacacatatactatgaacattgataacacagaagccagtctgcagaccacgaggagtgttttaatgttttaagagtagtatactaaacatgcttaagaaccactagtcttgaacaattttctgtatatataataaattatacagataaatagtatacaacttacctacaattcactgttgattttccaccttcaaattcagaattcttcccccatcttttaggtaattctaataccataagtccttttattcctataagtgctacatgatgttgtgttgggcttaacaagacttgatagatttcaaacaggggtggatttatgcaaagcaatctctgaaaattagagcaaaccagtcaacatagttaattttaatttaaatataggtggcagttacttgaaatcacagtaatacttagtttactacaattataggataataaaactctggataagtactcacacttgtaccattaactcacaaatttttttttttttttttgagacagagtcttgctgtcacccaggctggagtgcagtggcagcccactgcagactttactatgggggttcaagtgtcctccccacctcagcttccagaggagctgggactacaggtgtgcaccatcactcccagctaattaaaaaggttttttttgtagagatgggggtttcgtcatgttgcccaggctggtctgaacacctgttcccgtgctcacaagatccacctgcctccaccttggcctcctaaagtgctgattataggctacagctaccacacccagcttactcatgcttgcttttaacatccaaagttacaactcatgataagctgctttcttccccatctctaaggttttgagattttggaggagtgaaggttattgagatagtcaccaatatttactgaaagcttataaattctgggcactccagcatttctgtatgctggacatacaaaaataagtaaatagccaggcgtggtggcacatgcctgtagtcccagctacttccaggcgctgaggtgggaggatcactcgacccctgacagtagaggctccaatgagccgtgatcacaccactgcactccagcctgggcaacagagaaagaccccatttcaaaaataaaaaataaaatacgtttttaaaaaatgacaagggcagacccagcccctgccttggagcttacagtctagaaaagaagacagaggcagagtgccatggctcacggctgaaatgccagcactttgggaggccaagacgggtggatcacctgaggccaggagttccagatcagcctggttaacatggtgaaaccccgtctccactaaaaatacaaaaagtagccgggtacggtggagtgggcctgtaatcccaactactcaagaggctgaggcaggagaatcgcttgaatccatgaggtggaggttgcagttagctgagattgcaccactgcactccagcctgggcaacagagcgagatcctgcctcaaaacaaaacaaaacaaaaacagccgggcgcagtggctcacgcctgtaatcccaacactttgggaggccaaagccagcagatcacgaggtcaggagttcaagaccagcctggccaacatggcgaaaccccgtctctactaaaaacacaaaaattagtcgggcgtggtggcagatacctgtaatcccagctactcgcggggggggctgaggcagaagaatcgcttgaaactggaaggtggaggttgcggtgagccgagatggcgccattgcactccagcctgggcaacaagagcgaaactccatctcaaaaaaaaaaaaaagacacaaaataattataaataattaagttatgattatgtcaaatgctacacagcagtatagaatgttattagaatactgcgtgctgcacatttggtaattattattattttttgagacacagtcttgctctgttgcccaggctgtagtgcaggggcgtgatctcagctcactgcaacctcctcctcccaggttcaagcgattctcctgcctcaggcacctgagtagctgggattacaagggcgcgccactacacctggctaatttttgtatttttagtagagacggggtttcaccatgttggccaggctggtctcgaattcctgacttcaggtgatccacctgcctctgcctcccagtgttgggactgcaggcgtgagccaccgcgcccggccttcataattctttttaactgaaattgggtaaataagtagactgtagactcctgccctattttcaaaactgcagaagcattgctagcgtcttattaaaattaaatcacttctcggtaacaagaattggaccgggcacacaacagatgtcataccttagaatgagtaccaagctctttttcatctttaagagaatctgtgtattacaaataaacatttccataaaccaatatttgaccacggcaagtgtgtaatactttctggatcacacccattttcacatgctgtcggctaatcaaaaacaaaaatccccattttgggtatggctttattttctaaagcgggcgttacgggggtaagaattaacagagacttcctcctccatgtcaagcatgaagcgtggtgctttgaaacctgcaacctgacttgctgtgcacaacgcaagagaaagttacgatctaacctattataagcgtcacatcaggaaacaggtttctctcgacgaaactaaaaatagcaactccgcccactcgttctcaacccctttagcccgctttgtttttctccagagcactcatccgtcactagtatttttattgaatattcaatgaccctttccttcctcccaggcctccaggccgtaagcatcgagagagcctgagtccccgcgaccgcgtatggcagcgtcggagtcaatccgctggaacgcctgccacaagatgaaaaacagccaagaggagcaaggaacaaaaaagactggttccgatcccggtgagggtcacttccaagatcggcctggcattacctggtactgggacagggcgggctcttcgccgccgccgctggggccccgaaggcgaacgactaagaaggagctgtcttctccgtcccacaggaaaagctctccgccgaggccaaagaccacgtttctcgtcagcaactgcggcggcggcgacgaaggcaacgacgaagaagctggtttctcagcttcggttggactctggtttttcagtccctcccggagccgcaagaacacgacgtggttaggaagccaggtctgccacagctcgccgtcgcccaccggtccctcggcggccgccatcttggcccaactgctcccctcactccagttgctcagcccgccgctgagcacagccaatccgcggccgtccactcactgtttcggccaatcaccgagcagacggcccggaagctcgagaggctcgtgccaggtcggggggcgaaggcgaggccagcccaccaagcaggggcgtcaccaagggaaagccaatcaccattatttctgaagcccaagggggcgggacgagaagtcaacataatggtggtgctgctggaaatctagcacctggggagagcctgagacttgtgtatctaattgcctattggacacctccatctgggtaaacccaggcatccagaactttccctcaagacttacctccctcagtgcaggtcgggctggcctcacgcatttcgcttggatgcctaaatctgtctccacgtggggccggtcgataaaacaacacttcccagaatacgctgcgatccattcgcggtctgcacccggaaagtacacctcccaggggtctgtgcgcgcctccagggaacgggtcttgtggctttgtctcccgcgaagaggagatggcggagtcgttgaggtctccgcgccgctccctgtacaaactggtgggctcgccgccttggaaagaggctttccggcaggtgggtatggggtttgtgcagtggtctaccctagatcgtcccggtgaccgccgtcttccctgccttcgccttagccctgctccgtggagcaggtgccgcagcgcgcctggtctggtcaaacccaggcctgctgactgtagagtgtgggattagcccgggtcggtcaagtcctagaaagccttgtttttggattcgattttgttttgaatttaaattgtggtcaggacatcaccgtttgcacctctgcaataacactacctactgttgctgcggaggtggccaccgagagaggcactttgtctacgttcgtcttgtgagatagagatgatttctattctagagagtagtaaaatgaggcttagaagagggctccacctcagttctggcctcttctgaacacagtgtggttattagtaagtaatgtccaagaaagtaacccgacgcaagaaagatagcagatacagcagagtttctcagccttgacaatggacattttgagggagatatttatatgttgtggagggttgtttaagccacgtctcgggcctccacccactagatgctaatagtcctataactagaattgtgacaaccagaaatgtctccaagcattgccaaatgttccttgggggacaaaacctccctgagttcagaaacgctgctgtgcaggaaggccgttacccagccatatctagagtagcaagaatttggaaggaatataaatgttctgtaataggacattggatgctgagatattatgcacacaaccattaaggaaactggcaagctagaataaaaaatatggttctttgtaaatacgtgtacaaagcattgtaattttatgtatctctacagaggaatatgcaaaagtaacactagttagtattatcattgaaattttgtgtctataaactttctttaatgttttctcaactaatgtaagagtgttttttaaaaatagaaatgctttttttttcccccccaatcttgctcttttttcccagagatgcctggagagaatgagaaacagccgggacaggctcctaaacaggtaccgccaggctggaagcagtgggccagggaattctcagaacagctttctagttcaagaggtgatggaagaagagtggaatgctttgcagtcagtggagaattgtccagaagacttggctcaggtcaggctgggctatgtgttttcagggagggggactgcaccaccaagaacggctcgtgtcctcttttatttgtttacttgagtcctctaaacccaccattcccctaaccccatttagaattcaacagcctttaacccaggcttttctacacttaatgttagacttgtctagatgaaatggtctgaaataccagaccgtagacctgctcatcactgcaacatcatcatttatgaaactaaaaagaaagaaatttcatttcttgcctccacccttggaaattatgattcagtaggcataggctaggaatctctttctctccctctctctcgctctttttttttttctgtcttgctctgtcgcccaggctggagtgcagtggcaagatctcggctcactgcaacctccacctcctgggttcaaacgattctcctgtctcagcctcccaagtagctgggattacagatgtgtgccaccatgcccggctaattttgtttctgttttagcagggatggggtttcaccatgttggccaggctggtcttgaacgcctgacctctagtgatctgcccacgtcaggaatctctttctaaaaaggtctccagaaactttccgattctaatctcagccaacgttggcagccatgtgtggaagggaaaaccatttatagtgtatcaggaagaacactggattcgaagtcaggagttccagaattcaaatcctggtttggctattgactgttaacttcagtttgcctctttgaggtttagttttcacatttataaaatgagaagataatgttttcagcattgtaaggactgtgtaagaaaatgtgggcaactgtttgaaaccatcaacaccctgtgtaataatgatgcattattcagtggcttttgtgtgtcctgcagtacaccaatgtttgccttatatcaccacaactagtactcacagtaaccctcttagatagattttattcccactttacagaggccaaaactgagatttgcagagattaggaacttttcatgtggttacgtagccttggaagaatatgtacctaactgctaccctatatcgtctctccaaaattgggtaccattattttgtcactggatagttggatcatttgttgatggcttgtcagcatgacagcattaccccactgtcagcatattctgcaggaggactggactgattttgtccaataaatctgggttcttcaagccagcctccaagtatgaatcactgtggggcttggttggtgattaatacttcaaacttctgatgccgctcctttctcttccagctggaggagctgatagacatggctgtgctggaggaaattcaacaggagctgatcaaccaaggtaacccctagtggtagtccttccttacctgtatttagctactggaatactgtgacctttcctccaatcaggattagtttataagtcccctttgtctacctccatcagtcaagtgtccaaaagactccttttgtactctgacatcttggctgtctagcttctcaataataagggtctccagggtgctagaccttgtgctaagaacttctcatttaatgatgctgttttctccatgtgactgccctgtaagatagtagtattagaacagaaggtggttggtgttctcgtgcaggtcatacagctagtaagtggaggagatgggaagcaaaatcagttgtatgaatccagttcccatgtttcttctaccatcctgcctctctattaatgggttaatagttcactgagggtggtggcttatgcctgtaatcccagcattttgagaggctgaggcaggagtattgcttgaggccagttcaagaccagcatgggcaacataacaagatcctgtctctacagaagtaaaaaaaaaaaaaaaaaaattatctgggtgtggtagcaaatacttgtagcctccctcagccagaaggcttaggcaggaggatcacttgaacccaagagtttaaggttacagtgagctataattttaccacctcactccagcctggctgacagagggagaccctgtcactttaaaaaataaaataaaaaaaagtaaacctgccattttacaggatacagtgatagtgcatggtctgatcccttgccctattcattttaagtgccacattctctattaactccccagggcctgtgagcatccactccttgagggaggtgtccatagcatggtgtagagagcataattttgtaccttatatagttaagtcatttattccatgtagccctgatttgattaggccttgtttggtttttgtttttgttttttttgagacagggtctctgcccaggctggaatgcagtggcgtgatcacggcccactgcagccttgacctcctgggcttaagcgatcttcccacctcagccttctgaatagctgggatcataggcgtgtgccaccacccctggctaatttttttttattaattttttttttttagctaaagatgataaaaacaagacaaaaaattattttatttatgtattttttttttttttgagataggttcttgctctgttgcccaggctggagtgcagtgatgtaatcatggctcactgtggcttcatcctcctaggctcaaccaatcctctcatctcagcctcccgagtagctgggaccgcaagtgtgcaccaccataccgagctaatttttttatttttttgtagagacagggtctcactgtgttgcccaggctggtctcgaactcctccctggtctcaagtgatccccccacctcagcctcctaaagttttgagattacaggcatgagccaaaatgcctagcctaattttttaaatttttttgtagaggcagggtctcactatgttgcctaggctggtctcaaacagctggactcaaaccatcctcctacttcagcctcccaaagtgttgggattacagacatgaggcatggcccccagccttaggcttcatttttatgacctataaaatggagagaataccctataaatttgttgtaaggcttaaataacgtgtgtagaagacttagtgcattgtctggcatatagagagctttcaataatcaacagctattattatggtgaggcaagagcacaagctcttgagtcatacctctaacattcacttggctttactactttaatttgtgtggcaccgaccaaagcacttaatttccccgtgcctcagtttcttcacctttgaaataaggataataatagtgaagaagttaatatatgtaaggaatttaaaatagcatttgacacataagtgccatgcaagtgttagttgttaatgactgttgctgtcgactctggttagactgtaaattccttaagttatcatctttttttattgattttcccttcccccacctacaaaacctatcttagtggtgaaacataagcctgaccaaatgttttattttggggcatacttaactaataagtctgaagtgacaaggatttactgtgttgtgctgtactcagccataaggaacattctaaagcagaagttggcagactttttgtgaagagccagatagcaaatactttagacttcacagaccatgtggtctctggcacaatttctcagctctgcagttctagtggaaaagcagttatagacactacataaacaaataagcgtgactgtagttttttgaccccttccctaatgtctagactgtgagctcaacaatgacagtctttttcatctttgtgcccctgtgactagcagatactaggtactgttgtatgtttgctgaatgaatgagcacacagattctgaacaacacagattccaagtatgtggaatcagcagggtcgtcctggcatcagaaatcagttctctcttttttttttttttgacacagagtctcgctctgtcactcaggctggagtgcagtggcgcaatctcggatcactgcaacctccgcctcctgggttcaagtgattcttctgcctcagcctcccgagtagctgggattatagacgtgcgccacatgcctggctaattttttgtgtttgttagtagagatgggtttcaccatgttggccaggctggtttcgaactcctgacctcgagtgatctgcctgcctcagcctcccaaagtgttgggattacaggtgtgagtcaccgtgcccggccagcaatcagttctctttgtcaactttatttagttgcctgtgggaccctgacattctgtatctgtgctcctatggcctctggagatgtgtgtgaaaattgtctcctcggcccttagcctacttcacctcttgtgctcacaaaaaggggacagagaggagggagaggaatccagcaagatgaagccagcctgagagagcataaaaaccagtcattggtattgtggtcttgcccaaatctttccctcgtgtgaaggaagcctttgacagtgaagtttagaattaaatacagggccagctgaagcatggtgaagccctccaactgcctttgccttgcagagcagtccatcatcagcgagtatgagaagagcttgcagtttgatgaaaagtgtctcagcatcatgctggctgagtgggaggcaaacccactcatctgtcctgtatgtacaaagtaagagtttttaaaaccttttcagcattattcgttcccattccccactccaaggtgagtggaatctccccccagatttgttgcctgaaattcaaggtttggagatccaggtctggtggccatgatgctctgggatcctaattctgcttctaggtacaacctgagaatcacaagcggtgtggtggtgtgtcagtgtggcctgtccatcccatctcatgtgagtgttccacacacagatttcatgatacttcttcccacatggatctactttcttgaagatcctccagtgctgacttggagcccattgtgcatatttcttcccagttttatgttcagtggtgtcacattggtagcttcaaatcagccatggtgagaatatctatggcatgaaaattggcaaacagtacacatcagagcctttagggccctggagagccatcaccgcttaacgtttttatggagacctcagcttgggattggtaacgcctgtatctgacgtttcataaaaattttctatatatgaagacatacctaattcagaatttaagcttcagtaatttttttttttttttttttgagacggagtctcactctgttgcccaggctggagtacagtggcgtgatttaggctcactgcaacctctgccttgcgggttcaagtcattctcctgcctcagcctcccaagtagctgggattacaggtgcctgccaccacgcccggctaattttttttttatttttagtagagatgggttttcaccatcttggccaggctggtctcgaactcctgacttcgtgatccacccacttcagccttccaaagtgctgggattacaggtgtgagccaccacgcccggccttcagtaatcttaaaatacagaaaaagcccttttatctggcatgatggggactgcaagtttgccagttaattgagcgattggttaaagaggcaaattataaaaataaaatgttttatggtaagtttcaaacacataaatttatttgccagcctttgagtggggccctgctgattggagagctgagtcacctgttttattttttattttatttgagacagagtctcactctgtcacccaggctggagtgcagtggtgtgatctctgctcactgcaacctccacctcccgagttcaagcgaatctcctgcctcagcctcttgagtagctgggattacaggcacgtgccaccatgcctggctaatttttgtatttttagtagagacggggtttcaccatgttggtcacgctggtctcgaactcctgacttcaggtgatctgcccaccttggcctcccaaagtgttgggattacaagcgtgagccactgtgcctcgctgagtcaccttttttacataaacaacttctataatacatagtccagagtttccggttttaattccataaagtggatcaagaaactgagtatacaacttaggaatttttcctccccatcttttacctaattctatagctctttttctttctttcttttttttttaagcagctcatctgtttgtttcctaaacattctacttatcactataaaaataaaacttattatttacataataagtaattagcattactgagttacagtaggaagttcaagtaacccaagcagacccgggagcatatactgctagttgttggtaaggatgcactcagctggtgggggcagaggcagagggaggctggaaagtagcctacaatctctgagcgttcttcctgccatgagtggccatcagtgtgtttgacagcaggagtagagggcgttggttaatctggagaggcagttaaatggagatgggttaagagatcttggtacagtcatgggcccgagtgtctttaaggctccaaggagtcaagccatcacagtgagccacggttatattggttggcatgaggaatgaggattttccatctgttggctatcaagtcactgagaggaggttgaacttttttattttgtagtcttctgagttgacagagcagaagcttcgtgcctgtttagagggtagtataaatgagcacagtgcacattgtccccacacacctgaattttcagtcactggaggaacagaagaaaagtccagtcttctcatgagctgtctggtaagcgtctcctgggacccactctgtggtaagagggacctgtggttggttttattcccaccttgatagaaataatgacctataaacaggtaaatgtttaatgcagtttattatctgaggaatttacctgcatagaaaagtgaaggtaacaagtcatttagactcaaaggccagtcagaaagaagggaagaggcagcatgggatcacggcaagaggattggtctgggagttaggacgcctggctccacacctgctcttctttgatcagtagtagtggttttggattcagctggtcatttcatagtcataagacccagataggccatgctggcaccacttttgcggaaggaaacagggcagaagcatagcagggcagcattaggtttgtctgtcagtggagtttttacagaggtccaagggctattcgctaacctgagtgacaactgaggtgtgagggccaggaacacaagtgggtaagggaaccacctgtcttagaagcgtgctataggaaccaatatctcttataatccatgtcctttccatatatgtgtatgtatgtatgtacatgtgtatatatatcacacaaacacacataaaaccaatatgatacgtattattattgcttttagatcccaggcagggggagccttgggattaggagcacactgtacttcaggaagttcatagccatggctttctactgggaatttagaattccttcatggccctgtcattccaaatgcagttaacctacagaggtcatttttattataagcagcattgcctggtaacagccatttcacctttatcaagtttcttccataggtattctactcattcattaaaaaaaaaatgaattgaggactcattaacattgagaaatacacatctctcacagagctcaagccttgggttggtaataagagaacagaataaacaggcagtaccctggagagctgtacaaggagggcttatgggagttcagaggagggtgatctcctttatggtgacaccttcctggaggaggcatttaacttggccttgaagcatggaatcgatctggacagacatggagatctggtgagttgtgggggtagagcttaagtggaagatccccacatagaagaacaaggcagagaagcaggaaactggagtatatacaaagagcatcttgttctacttagctggagcattaggttcatgagggagaggatagttcctgttaggaataggaaacagattcagagaagtgatgtaatctggccaaaattttactactaataagcgatagagctggtgttagaccccaggtctttgtggttccagtgcccctgctgtttcctgctccaggctcaggccttggtggaaggatgccattttccatcagcttgtatggaaagagacatagcaggtgaaagtttaaataaaacccctcactacttcctgttgactacaagcatatgttcccttctgttccagctatccagcactggtagcagatgctcaaatatgcagtgctttcaggcctctgtgctgttgtttaggctgttctgtctgaatgactttgactcctcccactacatttaaggatcatttgcacaaatatttaccaagcactacaatatgccgtgtacttcattcagcctgattcctcacaaggaattggccagtctcagctggccacggtggctcacgcctgtaatcccagcactttgggaggccgaggtgggcagatcacctgaggtcaggagtttaagaccagcctggccaacatggtgaaaccccatctttactaaaaatacaaaacttagctggacatggtggtgggtgcctgtaatctcagctactcgggaggctggggcaggagaatcgcttgaacccgggaggcggaggttgcagtgagctgagatcgtgctgctggattccagcctgggcaacagggtgagattctgtctcaaaaacagaattggtggctgagtgcggtggctcacgcctgtaatccccacactttgggaggctgaggcggtcggatcatctgaggtcaggagttcaagaccagcctggccaatatgatgaaaccctgtctctactaaaaatacaaaaaaattagtcaggcatggtggcacacacctgtaatcccagctactcgcgaggctgaggcaggagaatcacttgaacccaggaagcggaggttgcggtgagcagagattacgccactgctctccagcctgggcaacaagagtgaaactccatctcaaaaaaagcaaaacaaacaaaaaaagaattggccagcctgggaagtccattcctttggagtctgtgttaccattctcaataaacctaatgagggctggcagaggggaactggccagtctctccttgggctttcaccgtacctcatgccatgtcacctgtaacagtgttgtagttacctgcttatgtctttgtccttgagggcaaggcccatatttatttttatttccagtgcttggcatatattaataaagaggtgcttaagatgtttgtacaaatgagttaaggtggagggaggagagttgaggcacaggtcagctggctttggcttctgtcttcttagtaaggtgaacagtgagtcatccacacagattataatggtagcagagctggagtctacagctccttgagtatgaaagtccccttgagtgtgaaagacaaaatgctggtcgggggaagagaaggggaattaaaaggtaagtggaagatggcctaattgccaagtgtacagcttcagctcagcatataattgttatggaccccagttatccactcacctaaccgtcagtgccctgtggctcagagcagcagtgaagctaagtaggaggtgaggtttggaaggtgagtgctgtgcagcagtcttggagatcatagttgacagtgccggctctggggtgggcaggaagaccattgttgggtaagtgaggggaggtgggggtcacagcaaatatgagaaacacagccaggcactgtggttcacacctgtaaccccagcatttaggaaggctgaggtgggaggatcacttgaggccaggaattcaagaccagcctgggcaacatggtgaaaccctgtctctactaaaaatacagaaattagctgggtgtggtggctcgcacctgtactcccagctactcggaaggctgaagtgggaggatggcttgagctcaggaggcagaggttgcagtgagctgagagggcgccattgcgctccaggctgggtgacagcgagattgtgccttaaaaaaaaaaaaaaaagaggagggggaaagacaaaattgtattctgtaggtcttgagttcaacatttggaaaggtagacatttggaatgctctagttccactagacctttggttttcacttaagggggaatcaaggaccattgtgttagaatccagtgaggtcaggacgtagggacgctcaggacagatggctgaggatgtgttgaaagataggggtgggttacagaagattgcactctatcacaagacgaggaatgtttcggatgtggcggtgctcaagtggtggtcctgggatggaatatgccaaaccgcctattagcagagttacagtgtcttttagagaaagccaaacatattacctgtggaagtggtaagaaacaagagtaacccacttatgcctactgtttaattattggaacgctaagcctgtgggagttattgatcccctactgctcaaggtcatcgccaaggtctgatttttcacacaaaaaaatttgcaacctctggcataaatgggttaaggacagactggattccttagcatagtggagaggctgagccacccaggagtcgggaggcagttttacactcaggtgcttactgatcatgtctttacatgttttctgcccgtactgatcatgcatggtttgcacctcccctatgatacatacctgcttcaatcttgtgtagatttggagtctcatcttcctgctgggctctaaaagctccaggctatcaagagtttgaatacaatctttctggtcagtggtttcctgatggtgaggatgtttgattagttcatctacaggatttgatcttagcttgaagactattgatgctgatggttcccagggcagttgtttgaaggctgcaggacagaggtccagcaatgccaaagaggggcggtcatcatgacaaactacactactgaactaattgaaactggactcaggagacctcatctaatgtgtagaattctcattgattacaacttttatcagatatctttcatgactagaatacaatttaagctaattattttcctgtttaaacctaggcctgtgatacttgggctgtgatcctctagagccagcttggactcacatcattctatggggttgaagacaactcattccctctgaggagccttgtacatacaagccttttatttataacttattttgtattgaaacttttaaacaatactgaagaaaaaaaaacttttccgacatctgttcttggtcttttgtgacgcaggttgaagggggaggaatagaaaaagacaaactgccttggaggagataaaccaattttatgtctatcatgttatacaaaaatctagaaataatagatttgtacagaaaaaaatgataataaatgagaacacaaaacatataatttaaatttggtattttttcccccatgatattaggatgataatcatttcaaagcacatgtctagcttcagagtaggatttgttcactggccaaagcctgccatgaaactatggctttcagcatctgtctgctctactggctcttgacaaaactcttgaggtcttcaagaaaagtaatgtactcctggtgctccagggctgtgctgagctccaccagctcatctgcaaaagtgttgtccacccctcggtcggcaaggaaatccattaggtggtcatataaggcctgcaaagaacaatatttactagttaaaaaaaaatctgtaatgaacattaaaatgcttttttctccccttgaactaggacccttccttccaaggcccaaaaggttcccccaccttatcaagcactcacccagtccaaggaatctgtgttgagtgtataattagtatccttccattcagactcgccagtggactgaaagctaacttccctgatagagaagatgtcactctcagcctcgtcttcttgtccaacctgagaagaaacaatattgggaaactgaagggttctccaggacaagctagactcaggggaagaaagggggccactgacagcatgaaactcatcaggttttaaccctcttccctcactccccacctctctccccctgctgggctggtctaagctagaaaagtgtttaaatttctgctaaaatagggacaggaagttcccaagggacacactgttccccaggggtgccaagaggctagcactccatcctgcatacctcatcctctggataatgacagtccaacacaagggccttcttgccatcatcattctttataacttcaaccacgaaattgggagttgatgtcagttcaggctggggaaacaagaagtcaatacatgctgctgctggaaggagatggatggctggatcaaggatctctgttcagagtgtctgatggccaccactattaggatattatgtagccatttgaatagtcttatgccatactattcccaaatgaagagcttgatctcacttctgttggcaccctgcttggttaaataacacactgggttttcagttaagaaatgtggataccagcctcagctatgtgccaattaactgagtttatatcagtcccttaacattccaagccttttcctccacccgtacactgcaaagctttcctaaagtttcaagatctctttccagcttgactgttccaggagtcttcataagggaccagggtcaaaggctggggaacctggccatccttatggctgaataacagcagcagcttttcctctgatgcggagctctgggagcagactgggtccaacgtcagggagatgctagttggggtggctgggaaagcagcacaccagagagctgcgccgtccacaccaggtcatgacccaacactgtactgatggctcttgggcagaatgtctagggactctgtggccctcatactggctggttactaggctgggcacagcacttcctgaaatgtttgaagagtaggcatgatccagttaaagtctcttatgcccctgccattctctctctcttttttttttttttttttttttgagacagagtcttgctctgtcgccaggctggagtgcagtggtgtgatcttggctcaccgcaacctctgcctcccgggttcaagcgattctcctgcctcagcctcccgagtagctgggattacagggacctgccaccatgcccagctaatttttgtatttttagtagagacggggtttcaccatgttggccaggatggtctcgatctcttgacctcgtgatctgcccgtctcggcctcccaaagtgctgggattataggcgtgagccatgcgactggacttagaggaattttttttttttgaaagaccaaagaaaaacgctcctcctctaagccccaggcacagcctgtcagaactgaggtaaaagctgattatagtattagcttacctcctgttcttcaaccttctgcccttgcgagggttcctcctcaccatcaaatgttggtgggatgctgttgttaatgttgaaagtgaccgtgattctaaaacggcaagggaaaacagacaaggcaaaacagacaaggcatggttttaaccgagcaggttaacacataaacatggaaatctgctacagttaaaaaggcgtattgaaacaatgtctctgtcctagctggctgaattatatgcagaacttcaaactaggctgggtgcctacatccaatcctgagtgactcagcaggtctgaagtgtgcctaccatgtaccagctgctggaagccaaagctggcctcagtttatctcagccaaacaagtcatgcatgggttactcccaacagggccagtaccccagggctcactgccatgtgctgactgggcatctcatggccacagccagctgacactgcccaccctggtctttccagggaacccttggtcaaagtaaggacctgagaggctggtgagatggaacagaagcccctttaagagactttccccgtcagaaaatttgccctgcaaggaaaggaagaagcgatggagggtgcctctgctaaacaccgagagcagccctggaacggggaagggaatgcctcacaaagaacaagggctgtagtagagactcatcccttagagtacttgtgggaagtttcataatcacaaagcaggccagacacaccaactagtgacaattttaaggtgcaagaatccacacctgacaaatcatgttccaaagtttgagtcaaaattcttgggacataaggtttagaaccaaaactgctgggctatgcaactctggcaggcaccattccacacaagagtacatgaaggctgggcgcagtggctcacgcctgtaatcccagcactttgggaggccgaggtgggcagatcacgaggtcaagagatcgagaccatcctggccaacacgatgaaactccatctctactaaaaaatacaaaaaaaaaaaaaaaaaaaaaattagctgggcgtggtggtacgcgcctgtaatcccagctactcaggaggctgaggcaggagaattgcttgaacctgggaggtggaggttgcagtgagccgagatcacgccactgctctccagcctggagacacagcaagactctgtcagaaaaaaaaaaaaaaaaaaaagagtacatgaagtgccgccctccacttgtgctaactagctgctctgccaggaagccacctttccatggcaacagaggcagtctgaggttgacaaaatctgtctaattccaactgtgctgactaagctgagctcctgggcacagaaattgaatgacgttcatcagagcattatttttaatggcccccaaatagctatgaaaaccttgcgcaaatggtgtttaggtgagattacagaagacacaattgacctgtgtagggcaaaaacacactatgcaacaggcaagagaatcaggaccctacttcacaccatattcaaaatgaatcacagacctaaactaagagctaaaactagaaaactttgaaaaaattaaggcatacatcttcacaaccttgggttaggcagtggtttcttagacgtgacactaaaaaagcacaagttgcacttggtgaattagaagcaaagtaaaaaataaataaaaaagcacaagcgaccaaaaaaataggtaaactgaacttcctcaaaattaaaaacttttgtgtcagaggacattaccaagaaagtgaaaaggaaacccacaagatgggaaacagtacttacaaatcattaatttgataagatagttgtacccagaaaaacttaacttttacaacccaacaattaaaaaggtaaatagggtgggcagggtggctcacacctgaaatcccagcactttgggaggccaaggcgggcggatcacgaggtcaggactttgagaccagcctggccaacacggtgaaaccctgtctctactaaaaatacaaaaattaaccggacgcacgcctgtaatcccagctaaggaggctgaggcaggagaattgtcagaacctgggaggcagaggttgcagtgagccaagatcgcaccactgcactccatcctgggtgacagagcaagactccgtggggttggggggggaagctacaaattgtatgactccatttatatgaaatgtccaaaagaggcaatcccatagagaaagtagcttagtgattacctggggtggctacagggaggaataatgagtgactgctaataggtattgtttggggatgacaacagtgttctagaattaggtagtgataactgatgcataattctgcgaggactaagaaccacttaatttaataaacttcaataaatgggtaaatcgtatgccatctcaattaaatctcataaaagctgtgatttaaaaaaattacatacacatcataaggtcaattatgaaggaaattcaatttatttatttattattgagatggcgtcttgctctgttgcccaggctggagcgcggtggcgcgatctcgactcactgcaacctccacctcccaggttcaagcgattcccctgcctcagcctcccgagtagctgggactacaggcacgtgccaccatacccggttaatttttactagagccagggttttagtgttagccaggattttctcctgacctcatgatctgcccgtcccaaagtgctgggattatgggtgtgagccaccgcgcccaggctcaatttaaaaacctggaagatgccaaatgtttatctgtgtaatgagattatggatgactataatgcagaaaagtgtaaacactttaacagtttaggagatgatgggggagctgacttaggtcacaaactccccacctctgatggcagcccttactacagtgtaaccccatcctgttacatagaagttacatatttttcattttcacccatactaaacattagagagcagtgtcctattttatcagggctgtaaatcagagatcaaactgattctgccagtacttttttgcactacatttttgtctccttagtaaccagcccacagcaaatttgtgttcggtgaatggactgcctggggcttacgaagttgtccaaatgaatccttcactctcttgaaacccatttatcaaagtatccacacctgaactcaaggctcttctggggatgacccaggatgggtcctgcaaggttaagggagttgctgccctgggatccccagaccagtacttacttttccccggcaactttccgcactaatttcgcttctgtcccattcagttccagctcccaacctccagacatcttagggagggttttatgcttctgaatttttctttcctccttaatttcatcactcaggaaatcaacaaaagctttgtctcctagaaaagaaatccagatacataaaaaggaaagccagttagtctaaaacataaaactattacccaggttattgcagccagaaacctggactgtttctaatctctctgctattacggttactctagaagcctgtttccttatcggtaaaaataccataatagtagtaggaagctgagcctgattctggaaaagtgatttccaacaatgaacgcattaccactttccgctataaaccaggagaatttccaatcctcttccacttgccaaacgatataactatgctattttcaaccacgaccatgggccttcccaaaggtccactttcgatagaataagactaaggaaaaaggtaccctagtatttaattttattcaccccctaccaaaagaaaacgaaactgctggataggggaggtgggggaaatatgatcatacgtgggtttagcccgctggttgccaatcaatggaaaaatgtcccagacctcagaggtcggttgcaggccctattcctggtctacgttttccctctgttgaacgcaaaccacacccccggcccgctaaacctcaccgtcggtgtgcagcgagccgcagccacagccacaggcgcagggtccgcgaggccgcaggaggcccggccgccgctcggaacctgcgcgcacgctgagcagcccgaagggccgggtgcacagccggggtgccggctgcaggagctgccggaaaggcgaggcgggcgcggcagcgcggaggccggcgacggaggagcccagcacacggggcacgcagcgcagcagaggcagcatcgcggaaacgactgcgaacacgtgcagatgcaaaggacaacccaggcctaggcgccccgcgacctgaggcgccgccggaagccccgccc

SEQ ID NO: 13036 - DNA, 1611 bp, Homo sapiens
gagcttcttccccattccccaccctgctcatctccttatctgtatccttggtcatatcttttgtatgaaaccggtaaatgtgtttccctgagttctgtgagtttctccagtaaattaatataacccaaagacagggttcagatttattaaaaatcaacaatcctaccttcccaggatatacaggacatataagctactaagaaggtatgtcttactaactcatggtaagactaacacttaatattttctaaataattttctatgaataatggaaaagagatgcaagaaacaagccacacacatcatatacaagattcatttttaatggatttgatcgtcgggtgcaaatttgagcattatttacaagagctttctgtagagttatttctgttcaaataaaaccagactctcaaaatacaacataagcctgaacctacttgatttttttttctccctctagttaccaaggaatatcgtatctcagatgcatggcctactatcacactggtctttaaagaaaaaaaaaaatgcatggccacagttccaggcagttcctggtagctggatttagtggatttatatatgacagtacagtacatcatcagtttcacccacagggcagaacttgcctccattcaggcatctctttacaactggcagcaatgcagcattaagggtttttagccaggacctgctgtttgcagtcctgccccttgtagtgttactctgggtgttgcacactccatgattactagaagacaaacacctgaggcatgcaatctgcttggagtgcatctatttacatgaagctgctcacgggagctggtgattcttccagatatgggtttcgtaggttggcaaagagttatcacaccatcagagattttaccaatggaaagagagtagctgaagattatattgcaatgttattgtgaaacatttaactttcttaagtttaaagtgtactatctcctgcagctcaatataaacaacgatgtatttctttgtagcagtatgtggagtcagaatgggttttccaatctgatttaatccctgagcagctatgttaaaagttaactttttaaaaaagcccaataaaaaactaaatactgtattaaaactctaccacaatgttacagggataaacttatttctgtacagaaacattaaagctacttagaagctgtttacatcctttgcctctcagaaaaaaaatatacatttccggaaactgttcaggtacttaagctggacataaattaccccaagttttttctttttctttctttctttctttttttttctgagaccgtctcacactgtcggccaggctggaatgcagtggcgtgatcttggctcactacaaactctgcctcccaagttcaagcaattcttgtgcctcagcctccccggtagctgggattacaggcgtgtgccaccatgcccagctaagttttctatttttagtagagacggggttttgccatgttggccaggctggtcttgaacttctcaagcaatccacccacctcagcctcccatcccaatgctgggattacaggcatgaggtgatccgcccgccttggcctcccaaagtgctgggattacagg

SEQ ID NO: 13037 - DNA, 695 bp, Homo sapiens
tcagaatggtgttgtcagggatcacaagctcccagccccgtgattagcaaattgaccctgctgccctgtctgctggctgctttcttattctgagaattgtgttgacaagaccctcttttcctacagagctctctcttaatgttgcttggaatagccttgtgtcctggagacagttttaggtctggcaggatctgagaacgggagtggggatcttggaatgggatctgcatccctgagcttcatccacaaagggtgggaatgtggcttgggctgtggggtggaggtagatgaacagctggacttgcaggtctatcttctgttgtttctcaataaagtagacaagtccatctgatgggtgtttagtagggtatgacttgtgagtccacaaggccagcagtatatatgctgaatggactgcttagcagtaacacactggaaaaatccaaaaagaatggatttcaagttggcaaaaaatgcattagaagtcagcagtgtgatgtggtcaggagaacaaccagagtgactgtgggatgaggtcttggatagctttgtttctatatacagtcagccctctgtatccatggtttctgcatccatggattcaaccaaccaaggctcgaaaatattaaaaaaaaaaaaaatccaaccataaaaaaatacaaataaaaaaaccaatataatataacaactgttca

SEQ ID NO: 13038 - DNA, 510 bp, Homo sapiens
cataaccccgtagaacatcaaatcattttcctttaattcccagagacttaatgtttctttgtcttgcgaatgacctcactgctttttgtatttgtaatggaatgcacagtcatttgtaagtaatcacacaataatcccttacacttttataatgccttacccttttccatagggctttcactctcattatctcatatgatccttataactgctctgagatataagcagagcgcctattttaatctccaattttcaggtgtagaaactgaggttcagaataaagttagccagagttaaaacagttagtatgtagcagaattggaaagggagtctacagaattggaactggagtctcctaaaccagtgtttcttttgctccttattgctggtgtgaccttgggaatatacttaacctctctgaacctcagtcttcctatcactaaattgggtataatactacctcctgggatagttgttggaagggattcaatgagactgggaaatcattta

SEQ ID NO: 13039 - DNA, 4073 bp, Homo sapiens
cagttccacacctgaatcctcaccgactgattgcctgcagaacagagcatttgatgacgaattagggcttggtggctcatgccctcctatgagggaaagtgatactagacaagaaaacttgaaaaccaaggctctcgtttctaacagttctttgcattggatacccatcccatcgaatgatgaggtagtgaaacagcccaaaccagaatccagagaacacataccatctgttgagccccaggttggagaggagtgggagaaagctgctcccacccctcctgcattgcctggggatttgacagctgaggagggtctagatcctcttgacagccttacttcactctggactgtgccatctcgaggaggcagtgacagcaatggcagttactgtcaacaggtggacattgaaaagctgaaaatcaacggagactctgaagcactgagtcctcacggtgagtccacggatacagcctctgactttgaaggtcacctcacggaggacagcagtgaggctgacactagagaagctgcagtgacaaagggatcttcggtggacaaggatgagaaacccaattggaaccaatctgccccactgtccaaggtgaatggtgacatgcgtctggttacaaggacagatgggatggttgctcctcagagctgggtgtctcgagtatgtgcggtccgccaaaagatcccagattccctactgctggccagtactgagtaccagccaagagccgtgtgcctgtccatgcctgggtcctcagtggaggccactaacccacttgtgatgcagttgctgcagggtagcttgcccctagagaaggttcttccaccagcccacgatgacagcatgtcagaatccccacaagtaccacttacaaaagaccagagccatggctcgctacgcatgggatctttacatggtcttggaaaaaacagtggcatggttgatggaagcagccccagttctttaagggctttgaaggagcctcttctgccagatagctgtgaaacaggcactggtcttgccaggattgaggccacccaggctcctggagcaccccaaaagaattgcaaggcagtcccaagttttgactccctccatccagtgacaaatcccattacatcctctaggaaactggaagaaatggattccaaagagcagttctcttcctttagttgtgaagatcagaaggaagtccgtgctatgtcacaggacagtaattcaaatgctgctccaggaaagagcccaggagatcttactacctcgagaacacctcgtttctcatctccaaatgtgatctcctttggtccagagcagacaggtcgggccctgggtgatcagagcaatgttacaggccaagggaagaagctttttggctctgggaatgtggctgcaacccttcagcgccccaggcctgcggacccgatgcctcttcctgctgagatccctccagtttttcccagtgggaagttgggaccaagcacaaactccatgtctggtggggtacagactccaagggaagactgggctccaaagccacatgcctttgttggcagcgtcaagaatgagaagacttttgtggggggtcctcttaaggcaaatgccgagaacaggaaagctactgggcatagtcccctggaactggtgggtcacttggaagggatgccctttgtcatggacttgcccttctggaaattaccccgagagccagggaaggggctcagtgagcctctggagccttcttctctcccctcccaactcagcatcaagcaggcattttatgggaagctttctaaactccaactgagttccaccagctttaattattcctctagctctcccacctttcccaaaggccttgctggaagtgtggtgcagctgagccacaaagcaaactttggtgcgagccacagtgcatcactttccttgcaaatgttcactgacagcagcacggtggaaagcatctcgctccagtgtgcgtgcagcctgaaagccatgatcatgtgccaaggctgcggtgcgttctgtcacgatgactgtattggaccctcaaagctctgtgtattgtgccttgtggtgagataataaattatggccatgggaaacattgtatatttagtgtgtgtattttgataatgattgatcttaaatctgtatacagaatatcattgatataatactctttaggcaggagcactcttgccttcccccaaaatttacactgctaaagccctctgtcacttggcgacccttctggtcttgctggaggggtttcctgggtataacccattgggctgcccaaggccagccagcctgagctctcctgcaagacagagcctgatgtggcacggagtggggttgcggggggtggggggactgcctgactcccagagggacttgaaactgaagcaagaaggttgcattctccaccaagggagttaacctacctgaactaagtagaaatgccagtcttccactaccccctccctgccatcttttcttctgctactttggggagttgatggccaggaaagaagccagcacagggttaaagtaactcctggcattgcccaccagggggctggtgcacctgctgacctcagggtcacagttgagtcatttgccagttgacggagcaagtttgaccttggttctgttgctgaagcaaatttggaacttttctgtctcagtgtgatccactaacccacaggatcatttggaaccttgaatagctctgcttggacaatggggttggggaatagggttgtctttcctatgaaaatgccatctgtagaccttgtgagtcagccgtccagatgtttgcaggtgaattcctctgcttgacatcctccctgtcactttggaccctatgggagtgggcatctccacgcacctgtgtatgtgaaagtcattttacatttcaaagcagtgtgtgtttcttatttttatatttttaactctttattcttggatgtataaagtgaactttttggcttctgtaagtatgctctatgcacctctaatgttttatcatgtatttatatgttgtacacagtactggctgattctgtaaatggatgtattgtacagagaacatgaacgtctcttcctaattttacatcttcagcatcattgcattaaagtggtgtaatctccttctctacatctgttgtcagagccactgagtgctgtgctgctcgacgtgagggtgaaatgattgacttgtgacctgccaggttgcccgatgccctgttgggtcaccggctggacctgctgcagcctgcagagccacagtcagcctgcccacatgccaccgagcaaacgcatcttgcttttcacatctctcctcctacagccttaatggctgcttgctgccatatgtgacaaatcaccaccaccagtgttaagtgcttctggattcatgggtgagttccctgggcagcccccaggaaggccttccagatctggctccagggtcaccacctgtcacagcaatacctgggaccatgctctcctgggactgtgaggctccttttgacgtacttttgacatcaggcaggtttgggaagaaacaaagccatgcctgctcctgcctctctcccaacatgtttccagcaagtagatgcccctgtgtgtgttttcccttgccttgtttcctgccttatatcttgtatttcgacttattacagagttgagggttcttgcttaatttagatcaagtataaaatttgtatgacttcaagtctcattttatctgaaaggtttttttctcatttaatctgatgtggcattttcgtcatctgaagcatgagtgacaagttgggaatgatgtggtgatttagaatgcagtattggccaagtccaagttgtcaacttaagcgtctgtttaccaaagaccgggaacaggggcccaaacatgtccagtcctcttcttccctctgctggaacctttggggacactcaagggtacagtttgacactgatctggtccatgaggctgcccagagaaagcactgcttctgtatgtctcttgtggtattggaacaataaacccgtacaacctgca

SEQ ID NO: 13040 - DNA, 1227 bp, Homo sapiens
tctcactttccttatctggcagccctcccagcagctttctgaaatctgtgaggtttcagaagaagcttttgagttgaataacgagttccacgttccaggccaagtcatgctttcagtctcctgtttaaaagtctatcaagttttggggcataagggtgggaggaaaataaaaccaaggcccctttgtcagcatacagcttcagtagataccccaaattcttgaaatctgtatagcagactgctggttttttctccttgtcagagcccagcccactgacactttacagttgacagcccagcccagatatgggccgctgtggcttctatcgaatcatgcttgggattgccacagttttcttctttggattggggcttgaggtggttgggaagaatgcatgccaaccagccctgcatctgggacttggagcctgtcagctccctgctctttgatgatggaatagtctgtggacttcttcccatttgtgagagaaaactcccccttagaactcaactggtagagcttctcatagcttacagttccaagcaatagcttggttgtaggtccaggcaggactctgacatggccctctggaatagcattgatgtgttgggttctttgctaagatgatttccagtctgtgttccagggagattcaggaaagctgaagttcattcttagaacctaggtctgtgtttgttgttttgttttgtttaaaaaaaaaaaaaaaaaccttgcctgatcttaagtgccagctgggaacttgttcagcatccacatgccagggcctcttgtcaccctcatttagttagaatttccaggggagggaccaggaaatctgtatgctccaacaggtgctccaaacaggcaggcttgggaaatgctacactaggtagccacccattttccttgttcagaaaaaccttaatctcttcctgtccatgtgtggtatatggctgccatgtagccagcaaccacatcaggctgtagaagacacttgctattcctttgttttacctcggttgcatccagtgctccgggcctttgcttcccagtacagctgatcaaccacacggcttccaaggacttgcccccttgtttccatgataacagccaatcgcataaatccatgtggggtgcaaaacatggttatgggtttcagtgatatatctctcaagaatgcttatcttttaacccaggaatgcaaataaaaatttgtatgaatttta

SEQ ID NO: 13041 - DNA, 635 bp, Homo sapiens
ttagctcattgttttaatgaaccacccaagacctttgtaattaaagaatgtactgaaacccttgaaaagaacacatttttgtaagtagattaaaccttgtcattctgttttgttcttcaggctacttagccaagcttctctgcccagatgatgtagagataaataaaccagataaatttaaacccaccctaactcaaattggcatatattttgaaataacaaagttagaatcagttttgttggatttactggaaagtctgatgtgatcatagccatttgttctggttccaaccagaagaacattaaaaattagaaaataatgtgtctcctgcttatttcccctggggtaaaagtcagaaaagatcttttcatgatcccttggagatggcgcttgccagaggcagggaggagtgtaggcatcagtggagatggtgagcccccaggggcagccactcaccaagccatggttacctgtgcctgttttgtgcctagcacatgataaagggcactcacatcacagagcctgttctctaaattcaaggataagattggaataggcaagggaggaacagaggagaaataaaatgcaaagggaaacatcagaaatgaatcattagcttttaagattccaagag

SEQ ID NO: 13042 - DNA, 4992 bp, Homo sapiens
aggcctgcccgccctgatggtcatcggcactgggagtgccaacagctacggcctctacaccatccgtgatagggagaaccgcacctctctggagctgtgagtggcggctgtgggagcaggggtgatgccagctccccggctacacatattggggctggagagaggtggggagaggagggatttctaggaaaatctagaccaaatatgtcaagaccagaagaatcctcagatccagctagctcatggcacagagaagtaaactgaagcctagagagagagaggggaagtgaaatgagagagggggcctgagaaaggagagggagaactggaccaggaggcaggatgccttacttgagcctgggccaacacgagcccacatggcaccttgaggcaaagtaaagaaggtcaccccgtccgcatgcggggtgcgcagcctggagagtggagggtgtgttggatttcagcccccacctgctgcccagccaggtgtccttgttcaggccaccacctgcccagtgattcacagtagccctgggtctagtctgggctctgccctgcctgctatgtgtgtgatcttggcaggcccgatctctcccagggcctcagtctcctcatctgcaccatgggggaactgatcaacatgctctttgaggccctttgcccctgcagtgcagagggcagtggagctgagttcagtttctagactcacaccttgggatccatggggcacccaccactgggcccatggctctgtgctaagaggagctggtgaggccttggacctgtccccaggcctcaaaagcaggggccccaggagctggaggggtcacaaaggtgcaggcagtgggccaggtggggactgcagcggactggcagtcacaagcccatctaattagcggtcagttactatccttcaggagggcatccacagagctgccaggtgtatgattttataggagaagcagaaatctaggtgtttataccaaagcttctgattttaaaggcggccactaattccgtttttttcacaatgtaatatggggcaaatgaaacatgtctttgaggtcactttggcattaaagagacaccagactggagccaggtgacggcccctcccacagcgggagagccagggattgatgggtggaaatgggagaggcaccttcacagacagaaaagctcagccaggggacttcctgggtttgctggccagaggtaccactcccagtcccaccacagctgccccctcctccagatgctggttccgtgaagggacaaccatgtacgccctctatatcaccgtccacggctacttcctcatcaccttcctctttggcatggtggtcctggccctggtggtctggaagatcttcaccctgtcccgtgctacagcggtcaaggagcgggggaagaaccggaagaaggtgctcaccctgctgggcctctcgagcctggtgggtgtgacatgggggttggccatcttcaccccgttgggcctctccaccgtctacatctttgcacttttcaactccttgcaaggtgaggcccctgcaccagggaggtgatgggctgtgttgtctgtcccaggaggtattgggaggtggggaagagggtggtttgcaagacacaggactctgttcaggctagctgaagtcaaggatgttgatttcaaatactcagagcaaggatccagggcagcaaagtttggctgctgtattagtccgtttgtgttactagaatacaaaggaatactcgagactgggtaatttataaagaaaatggggttaattggctcatggttctgcaggctttagacaaagcacaacaccagtatctgctcctggtgaggcctcaggaagcttccaatcatggtggaagataaaggggagccaggcgtatcacatggcgagagtgggagcaagggagtggggaggcaccatgccgttttaaacagcgagatctcgcatgaactccaagtgagcactcactcatcaccaaggggatagtgctaagccatgcatgaggatccgctccaaggatccaatctcctcccctcaggccccacctccaacattgggaatcacatttggacatgagatttggaagcaacaaacatcccagacatatcagctgccttcatgggagctgctaccagaatcagaaaaagccacccaaaccaaagcagatacgttctctatctttttcctggagctatggagtctctcacctagtgtctgtggaaactccttcattctctctccacttaccctttactacccatggccccaaattgttacccaacatggctgccgtaaccctacctgaccttgcaagttgggtgtccatcgtccatctctggtccaatcagctgcgaccagaagggcagaatcatgtgatatgatgtccacatgacatggatgggatctccagggatctatggaggtaggaaggaaatgcttgctgtatttgttactggcccccgcagggcccttcctctgagatcccagcaaaggggtaagagcagtccatgtgctatggtttatatgtgttctctttgctccttacatccacagcccagagaggcatcacagtctgactgtgagagaaacagccaagacaggagtgacgagactcaacctgttcagggaagtcactagaaacccaggcgtcctagatgcagcgggtataagcccccaagaccaggactggctcccagcgccccatgagagatgtgtggcttagtggctagggccaggcagccctgggtccaaatcctagccccatccctgacccagcaagtcactcagctccttccgtcctcattcatcgcgaaattgggataatcccgtacttatctcaccagcttttttttttttttaattgagatggagtcttgctctgtcacccaggctggagtgcagtggcacgatctcagctcactgcgacctccacctcctgggttcaagtaattcttctggtttcagcctcctgagtagctggaactacaggcacatgccaccatgcccagctaatttttgaatttttagtagaaatggggtttcaccatactggtcaggctggtctcaaactcctgacctcagatgatctacctgcctcagcctccgaaagtgctgggattacaggcgtgagccactgtgcctggcctgccagatttcacaatgaacaatgacaatgcatatgtgggaactactaggtcttcaatatgtgggaactatattaataatcatagaaattatgactgtaaggccatctgaggctgtctccaggtggagaatcatgagtccatgcctggagaatcccaggggttgatggttggggagaaatgaactttgaaactatagctgacatcgttattctttcagaggttaccttaatatgtaagcctgcacacttcactctactaagtttccactgggtctgagttattctgtatttctctcttcctctccaatacaacagagcccttggtatacttgaattgcccattgaactcttctcaatatttgtcttgcatatagaggtttagttacagatttccttgaaacatagagtttttctaagtcatgttctgtacttactataatttctttcaccccacactttcccttttcctcttgctggagtgcctcccataataatcctttatagagggagtgatggttgttttgtatgtctgaaaattcctctattttgctctttcttttctgtaataggcataggtagatattttatttgaaggtctctgtttttcatttccaagatttcgatttggttcttttttatttcatttttgaaatggttgtgaaatggttgcatttttgcctttcccagcagttcttgagtggttacggtgggtctcctccctctcagcagccaccagcccaggctgccccactctctgcccacccctttccaggctcaccgaggcctctccttcctaacaggtgtcttcatctgctgctggttcaccatcctttacctcccaagtcagagcaccacagtctcctcctctactgcaagattggaccaggcccactccgcatctcaagaataggaaggcacggccctgcaatatggactcagctctggctctctgtgtgaccttgggcagctccgtgcctctctctgtactccctcagtttccttctctgtacaatgtggctggggagggagaggatgggaccaggttggaccacgtggcatcagaggtcccatccagatccaactataggtccaagagtccacgtaagcaggtttgcaaggctctaaagttcctatagtcctgagaccccctgccagcaaagagtgacagtcacctccatgccctgccctcattgcaaagccctcactcaccttctggtctcagcaagggaggagagtctgttgctggcatagccctggaaggagcccccagcctctcccctcctcctccttgtcactggcctcccacaactccccttctggctgcctgtaaccttgaggggcattcaggaggccagcgttccctcaggcactgggggtttgttttggggggtgggagttgatcctcccacccagtctgcccctggtctctgcccatccaatcagagcccaccctcctggaagagacccccgtgttcagagtgctggcagccctgcacgtgtccagggacactgcatttcaaagaaccactgagtgggtgagctaccttgggcaaaccccccactcctgactctgactgccacgtgggtggcccgacctctgacctgctgtcatcgtagaggtagaaagcaaacaatctggggctcagcacacctgggggtgctcccactcattcagtgtgtggggcccctgagcagaggctgggcattgccactaggacctgagctcctagagaacaaggacctgggtggcctcgcttactgttccagcccaggccaagcacagggtctggctcgtggcaaaccttgaataaatatttgttggctgaa

SEQ ID NO: 13043 - DNA, 3861 bp, Homo sapiens
agggaccactggagactggtcttctgagggctgctccacggaggtcagacctgaggggaccgtgtgctgctgtgaccacctgacctttttcgccctgctcctggtaacagccccctccactctgatcccagccatcccaggggcttccagctcctgccctggggagggggctgcctggtggtctttgggtatatgggcctggcctccaactgacgtggtcccggttctggggtcacccacagagacccaccttggaccagtccacggtgcatatcctcacacgcatctcccaggcgggctgtggggtctccatgatcttcctggccttcaccattattctttatgcctttctgaggtgagtgatccccacctccccaccatgtctccctcccgccctcaagggaggcagcagggcagggtgggaagcattcaggttgtgcagcctctgaccgttgtcccctccacacgttagtgtcctcatcccaaaatggggttgggggttgaaatgtgtcagagctatttcaggagcaagtggcagaaactcaactcaaattggcttaaacataatagggaatgtgtggttcacgtaactgagaatagcaaatagcaaatagggttcatgtaattgaaaaacccaaggtgcatggacttctggcagggttcgatccagggggtcaaaagaggtccccagaacttggtctccctctacctctcacagctttgctcgccccttgacagtcacatcgggcagctttaccaccctcaggggccctggctgcctcaggattgcatcatagctccttagctgcttaggcagaaataaaagagatctcctctttccaagtattctaagatgaatcccaggattgagaaggattttattttgagataaaacagaaagatgcaaaaatagtgcagagtcctgtggttcgttctcccagattccccctgtggatacatcatagacaactgtagttcaatatcaaaaccagcagctggtggtacagtactgttgactagaatacagactttgctcagttttcaccattttttatgtacattcatgtgtgtgtctgtgtgtgtgtctgtgtgtgtgtgtgtgtgtgtgtgtgtgcgcgcgtgcgtgcgcgcaggacatatcatttgattggcccagtccaaaatgaaaataaagaaggctgggcgtagtagctcatgcctgtaatcccagcactttgggaggccgaggcaggtagatcacctgaggtcaggagttcgagaccagtctggccaacatggtgaaagcccatctctactaaaaatacaaaacaaaagttagctgggcgtggtggtgcgcgcctgtaatcccagctactcaggaggttgaggcaggagaatcgcttgaaccaaggaggcggaggttgcagtgagccgagatcacaccattgcactccagcctggacaacaagtgcaaaactccgtctcaaaaaaaaaaaaaaaaaaaagagagagagagagagaaagaaaatatatggccccttattcaaaaaattttaagaatgtcaagatggcgacagtagaacattaagtccttctgcgtatggggtcctacagaggtcacatgctcatgaaactggccctgtgtgagcatgtgtgtgcatgtctgtgtatatcagcctatgcagttttatcccgtgtatacaccagagttgagtcttactggtctaacttggaccatgtgcccatgcctgtctgggtcactgtggtcaagagctggaatacacagattggccggccaggccatgtgtctgctcttgggtttgagctaacaaagaacccctggcccctgacttatgagagtggggacgggcgttccttagggaaacctggggctgtgtccagaagaggtgggagtgagtgcaggacaggcagaaacagcagagagcactgcagcctgggcccaggccatggctgagggacccacaggatctgccagcttgaaggagcctaggggagctgccagtgctccagcttgtcctgtcccctgcctcctgggggtccctgggggtggcctaaagcagcccttgggtctcctgcccccgcatccagggccgtccctccgccctctccacgtgcctctgtgtcagcatttggccctaggctgcagccccaactaggcccacccaatccatcacagaccaacccatgagtgtaaatggtgcccctcacccccaccctccaagccctggcctaggacatggtccccatccccaacaagccgagtgtgacttgccagctggccgcattgctggaccctgtgagcggggcttggagcgccaggagaaattaccaccagctccccagggtggggcctggcatctcaggtgaggtggacatgatcccagatgctcctccaggaagcccccggctcccctccctcggctgagagcccttttggatctggtttgctaagaattcagagtgggggctccagagagagggaggtgagcctggtgagtcactggacagggagtctggagcccagggttggagcccctgccctgctctgtgaccccataaggctcccgtccctctctaagcctcactctcctactgcattttcggcttcatgcatccacccatctgtccatccacttcaccaatggatccctggtcccaccactgttaggcctgaagttcacagcatgggaaagacccgaggagagagaggatggggagttacactatgctgctgggaaatgtccagttcagctcaggctaaggggcattcagagatggcctccccagaaggaaacctccaaggggcatttgaaaggcagaagaagaggagtcaggcaaagaaggtgggaggagctggggagcagggaaaggcattgagaacagtgggaagagctgacctctgcgaaatgagatcagcctcaccttggtatagtttgggtcattccaggtgttttttttcttctcttcccaaggctgcctaatctctagccagtgtctggcttttgactgataggtgtgttgctcagttactttgggcccgtgtacgtttgtgtgtcacctccatcccataattttaagtacatgcatgatatgcagcccatatgcatgaaccttaagtagctaattatcatacagggttatgtgaaagaaactttttctctctaatgtaaatgcccatctctgaagagctgccccttactggtttggtccggatcttgccggccacggggtcccttttttatgtcacttttgtcttgcctgctgaacctctgcttttcatctcacttcttgctcacccgtcccattcaccgtgcttctattctctgcttttacttattctgccctttatccaacttttaattccctttgctattctcctgcctcattttctggcctcattttccctattatcctgcctcacattgatcaagggatgaggctggcaggatccggaacccacagggccccgtgggccatgagaggctcctggacttgaacctcaggacactcccactctggctgccggcagggatggaagctggatgagcaggcaggagctggcagtgggggtggagagccataggctattggggtggacaggcttgggtgcctcatgggagctccccatgggagctgtggccccttggggcctcttatttctcaccccaggctttcccgggagaggttcaagtcagaagatgccccaaagatccacgtggccctgggtggcagcctgttcctcctgaatctggccttcttggtcaatgtggggagtggctcaaaggggtctgatgctgcctgctgggcccggggggctgtcttccactacttcctgctctgtgccttcacctggatgggcct

SEQ ID NO: 13044 - DNA, 148 bp, Homo sapiens
tgcacctgtagtcccagctactcaggaggctgaggcaggagaattgcttgaacctgggaggtggaggttgcagtgagctgagattgtgccactgtactccagcctgggcaacagagcgagactccatctcaaaaaaaaaaaaaaaaaa

SEQ ID NO: 13045 - DNA, 2673 bp, Homo sapiens
cggcggggccgtgtctggtctgcaaggcgcgcgggctcgtggggggttggctggggagcccacgctgcctggcgactcgggccaccgaatgtgagaccgagtccctttatgtcaccagcgcacacgctgatttgaaccctgcttcgacgtgtgtgtcatggcttaaaaatagctgctaatctgtcaacctgtcttgggcagaaacagcggcggcgacagcagcaggagcgtcatggccgtggcgctgtctgcgccggcgatccgcctttcggactgaggcccagcgcagcgcttgcaaagaggtagaggggctgcggcgggccttcgccttttcagctggctctccacgctggggagaggcgcccagctaggggcgacgggggagggaggggaccgggaagcgggcacccgagcccagcgagccagcctctctctcccgggcgccctccctccgcgcgcggggcccggctgccaggctggcgaggactggggcgacagccatggacctgttacaaaggcgaccgcaggcggagggagggagcggcgggccagggcccctggagccgacggatgggattggagaatgcccagggctgtatccctggacagaaaggggcttctgcatcccccgggaaaaacagccccacggagatccttcttagacctgggctccttcacgcttcccccatcccattcatcatctcgtagacagcagactctctaagaggaaaggttgtattgcaatacagtaatggggtctttaggcctgggtgcaaaggtagaagaagatgatggtgatagtgatggtggtgatggtggtagtgatgatggtgatggtggtggtgatgatggctgtagtgctatatttctgtgctccttccggacccagccattgaaaactctctctccctaaactccctaacatccaatcttccctcaccaatcctggtcctaaaacccctgcttctaatgccttgtaagtgcttggtttctcttggcactggagcaagggagagctgggccctgtctaggggtgtgagatggggacagagcatgggcagggacaaagatggcctctcactgctggtcatagagttgaagtccccctggcaggaggccaggaagggagtggaaggggattctgcaggctccaggacctcctgctttcaaacaggcaggaccacaggtgtgagaggatggggagggagggggaaggggccttgccattgttgcctccctgcctgaaggtcccagggcaagcctcaaacgctggtccttcccagctctgcagctcaacaggtaatctgagacacacctgctaagcccctcgttattgacctcgtgttttgtagggtcacttgactccaacagccatacggttggtaattctaagcctctgagcccctggacctggcaggatccctcatttttccctttccttcctgctttctaggcccccaccacccacccctgtcccccctcccctcaagacacacacagacaaaacactccaaccctgcgtcaattcccccaccatccacctctgtcaccctcccctcaagacacacacagacaaaacactccaaccctgcttagattcagaaattctcacattagagctgagatctgatcagtaatttcctaatgctgatccaaggagggtggtttgcctgttgtgcacatagattggtgccttcttccataagctcatgcattcagcaagtatttattttttgcaaacttactcttcctctttattgctattctccactcaccccatcccacccccaccacacccttcccatagcaggtttatctctgaggcagtggcaggtcacgaaggggttaaagtctaactctggcacagagatggcaggcctgacatgtgtcatggcctcagctgctgttgtctccctgctaattctctttggatgggtctaaaggtacccccaaccccatcccagctccctaggctctctgccgatagccccaggcagatgagactcagattccagctggcaagatccccagcagtggggacaaccacccaagtgccgtgtgtgtgtgtgtgtgtgtgtgtgtgtatgcgtgctggcagtgggggtggggtgatgaagctgaaacctagcagctgggcagctccctctccccgtaaacaaggacatgtgactctcccacctcgtttcgtggcagagccaaagagctgagcaaaaggagctgctgcagcttgaagaaaaagccacccctgaaggctcctgccagagccaggcttaccttctctccctcgagaatcttctcccgaaggaccagcccagggaagggaagcagctgctctggactcactcaagtgtgtctcacaccccttcctcttccagcagcagctacctggcaactgaacccatcatcaccacagccactcctgcagctgccacggtttctgccacctctaagatgtgccctggtaactggctttgggcttctatgacttttatggcccgcttctcccggagtagctcaaggtctcctgttcgaactcgagggaccctggaggagatgccaaccgttcaacatcctttcctcaatgtcttcgagttggagcggctcctctacacaggcaagacagcctgtaaccatgccgacgaggtctggccaggcctctatctcggagaccag

SEQ ID NO: 13046 - DNA, 7733 bp, Homo sapiens
cggcggggccgtgtctggtctgcaaggcgcgcgggctcgtggggggttggctggggagcccacgctgcctggcgactcgggccaccgaatgtgagaccgagtccctttatgtcaccagcgcacacgctgatttgaaccctgcttcgacgtgtgtgtcatggcttaaaaatagctgctaatctgtcaacctgtcttgggcagaaacagcggcggcgacagcagcaggagcgtcatggccgtggcgctgtctgcgccggcgatccgcctttcggactgaggcccagcgcagcgcttgcaaagaggtagaggggctgcggcgggccttcgccttttcagctggctctccacgctggggagaggcgcccagctaggggcgacgggggagggaggggaccgggaagcgggcacccgagcccagcgagccagcctctctctcccgggcgccctccctccgcgcgcggggcccggctgccaggctggcgaggactggggcgacagccatggacctgttacaaaggcgaccgcaggcggagggagggagcggcgggccagggcccctggagccgacggatgggattggagaatgcccagggctgtatccctggacagaaaggggcttctgcatcccccgggaaaaacagccccacggagatccttcttagacctgggctccttcacgcttcccccatcccattcatcatctcgtagacagcagactctctaagaggaaaggttgtattgcaatacagtaatggggtctttaggcctgggtgcaaaggtagaagaagatgatggtgatagtgatggtggtgatggtggtagtgatgatggtgatggtggtggtgatgatggctgtagtgctatatttctgtgctccttccggacccagccattgaaaactctctctccctaaactccctaacatccaatcttccctcaccaatcctggtcctaaaacccctgcttctaatgccttgtaagtgcttggtttctcttggcactggagcaagggagagctgggccctgtctaggggtgtgagatggggacagagcatgggcagggacaaagatggcctctcactgctggtcatagagttgaagtccccctggcaggaggccaggaagggagtggaaggggattctgcaggctccaggacctcctgctttcaaacaggcaggaccacaggtgtgagaggatggggagggagggggaaggggccttgccattgttgcctccctgcctgaaggtcccagggcaagcctcaaacgctggtccttcccagctctgcagctcaacaggtaatctgagacacacctgctaagcccctcgttattgacctcgtgttttgtagggtcacttgactccaacagccatacggttggtaattctaagcctctgagcccctggacctggcaggatccctcatttttccctttccttcctgctttctaggcccccaccacccacccctgtcccccctcccctcaagacacacacagacaaaacactccaaccctgcgtcaattcccccaccatccacctctgtcaccctcccctcaagacacacacagacaaaacactccaaccctgcttagattcagaaattctcacattagagctgagatctgatcagtaatttcctaatgctgatccaaggagggtggtttgcctgttgtgcacatagattggtgccttcttccataagctcatgcattcagcaagtatttattttttgcaaacttactcttcctctttattgctattctccactcaccccatcccacccccaccacacccttcccatagcaggtttatctctgaggcagtggcaggtcacgaaggggttaaagtctaactctggcacagagatggcaggcctgacatgtgtcatggcctcagctgctgttgtctccctgctaattctctttggatgggtctaaaggtacccccaaccccatcccagctccctaggctctctgccgatagccccaggcagatgagactcagattccagctggcaagatccccagcagtggggacaaccacccaagtgccgtgtgtgtgtgtgtgtgtgtgtgtgtgtatgcgtgctggcagtgggggtggggtgatgaagctgaaacctagcagctgggcagctccctctccccgtaaacaaggacatgtgactctcccacctcgtttcgtggcagagccaaagagctgagcaaaaggagctgctgcagcttgaagaaaaagccacccctgaaggctcctgccagagccaggcttaccttctctccctcgagaatcttctcccgaaggaccagcccagggaagggaagcagctgctctggactcactcaagtgtgtctcacaccccttcctcttccagcagcagctacctggcaactgaacccatcatcaccacagccactcctgcagctgccacggtttctgccacctctaagatgtgccctggtaactggctttgggcttctatgacttttatggcccgcttctcccggagtagctcaaggtctcctgttcgaactcgagggaccctggaggagatgccaaccgttcaacatcctttcctcaatgtcttcgagttggagcggctcctctacacaggcaagacagcctgtaaccatgccgacgaggtctggccaggcctctatctcggagaccagtatgtatcgggcagactgggcccacggtagagcgtgtgtgtgtttgtgtgtgtaagaaaggagaagggtggcagacaggtatgcagtggtgtcattggttcctggttgaagattgaggggatagggcacatgggccaagagtagaggctgcaggtttgggagagtttggccaggattattgaaatgcccaactctggccagtcacagtgtctcttgcctgtgatcccagcagtttgaaaggctgaggcaggagtatctagagtacaggagttctagaccagcctgagcaacaaaaccagaccccatctctacttattattttaaaataaaataaataaaataaaaatacccaagtctggacagaaagactctgttccagtaataatatcattcatgtatcacatatttattattacatgccagtgctacataccaggcacaatagatgacttctctgaccttccatctattgtgcaatgtctctgggaaaaggcagccactggaagccaggagcagtaggtaggaagctgcagtggtttctcttgagaccaagcaaagcggcagtgcctacagagattctgcaatttgaaggctatggagagaaaaacatcaaaggaagagccatccccacttctctccctcaaagttatacaaggatttcttttgcttctttggtttgttttggttttggtttctttcttttatttttttttggagacagtatcactctgtcacccaggctggagtgcagtggcgcgatcttggttctctgcaacctccacctcccgggttcaagcgattctcctgcctcagcctccagagtagctgggactacaggcacacaccgccttgcccggctaattatttttttgtattttagtagagacggggtttcaccgtgttgcccaggctggtcttgagctcctgagctcaggcagtccacctgtctcggcctctcaaagtgctaggattataggtgtgagccaccgtgcccagcattgttgttgtttttgagacagggtctcactgttgcccaggctggagtgcagtagcccaatctcagctcacagcaaactccgcctcccgggttcaagcaattctcctgcctctgcctcccaagtagctgggcttacagacgcccatcaccacacacagctgatttttgtatttttagtagagacggcgtctagccatgttggccaggctgattttgaactcctggcctcaagtgatccacctgcttcagcctcccaaagtgctgggattacaagcatgagccaccgtgcctggcctacaaggatttttttcacacacattatctctcttaatcttcacaacagccctgtgagataggtatcactctccctgggttacagatgaggagactgaagctcagagaagttgtgcctggccaaggtcacacgggttgtaagtagcagagcccgggcttggaggctcaagttcagtgctctttctgcttaaggagtttgcactggacagggcaactcagtttgccctgagatatgactgtggtgcccaggggtgtctgccaccaagctgaggggtctgggccggatgaacacctgaaggtgacgtcataaaacagggtaaatgtggccgggcatggtggctcacatctgtaatcccagcactttgggatacttaggcggatggatcacgaggtcaggagttcaagaccagcctggccaagatagtgaaaccccgtctctactaaaaatacaaatattagcctggcatggtggtgggcacctgtaatcccagctactcgggaggctgaggcagagaattgcttgaacccgggaggcagaggtggcagtgagccgagatcgcgccactgcactctagcactccagcctaggtgacagagcaagacaccatctcaaaaaaaaaaacaaacaacaacaacaacaacaaaaaaaaacacagtcacagtaaatgtgagccatggaatatctggcaaaaacacaagacggttctgggtgtcaacaagagtagagacataggggagttaggtgtggaagtggatgtcagaaccatactatctcagagtgagcaggaccgatgaaatgagcagaacaatctgcctgacattcatttcccctctgcagcatccatggctacatggccatctcctctttctgcctgaataccccagggacaggaaaaccactctctctcgaggttctccaccctttcctcagctagactccaccattagaatgtacttccttgtatgaaattgaaatcagctggccaggcacagtggctcacgcctataatcccagcactttgggaggcctagataggtggatcacaaggtcaggagttcgagaccagcttggccaacacgatgaaatcccatctctactaaaaatacaaaaattagccgggcatggtggcaggcacctgtaatcccagctactcaggaggctgaggcaggagattcgtttgaacctgggaggcagaggtggcagtgagcactctggcctaggaaacagagcgagactccatctcaaaaaaaaatcaacaataggattcaggaagttaacagggtgtagacaagggagtcttccccaacaacctggctttcccacccttcctctaacctctactcaatgcagggacatggctaacaaccgccgggagcttcgccgcctgggcatcacgcacgtcctcaatgcctcacacagccggtggcgaggcacgcccgaggcctatgaggggctgggcatccgctacctgggtgttgaggcccacgactcgccagcctttgacatgagcatccacttccagacggctgccgacttcatccaccgggcgctgagccagccaggaggtaggaggggaatgctgggagcaggaaagaacagggtgcctggaatttggggaagtccaagggtctgagagtggagtgagattttagtgacatgacaaaatgctcaggatcttgttaagaaagaaaaaaatattatctcaaccatttttttaaagcaatacagaaaaagacaagaaggaaattatcaaaaatgttaagagtggcaagttacacctgggtggcaagattatatgtgatcgactttttcttttttgtttttttgagatggagtctttctctgtcacccaggctggagtgcagtgacgtgatctcagctcactgtaacctccgcctcccaggttcaagcgattctcctgcctcagcctcccaagtagctgagattacaggtgtccgccaccacatccagctaatttttgtatttttaatagagacatggtttcaccatgttggccaggctggtcctgaactcctgacctcaggtgatccacccgcctcggcctcccaaagtgctggaattacaggcatgagccactgcacccagccagcaggaggatttcttaagcccaggaattagaggttgtagtgagctatgattgtgccactgcactcagcctgagaggcagagcaagaccctgtctccatatacatatatatatattcaatggttgagaataacaagctagaatggtggagagattgaggaaggggccagtaatgacagtgttttcaatggactcattcacgctactctatgcaaagctggctcttacatcagtggtgagtctccacctttgacccctttcaggtttatggacactgagccactgcatgtccccttcctctcattctgtccaggcctctccccttttgccagagatctgcattcctaacatccactcatctgcacccattcctgtcttcatgcacctgtacttacctgtcttcctcttccctgtccatgtcaccctttttttttttttttttttttttttttgagatggggtttcacttttgttgcctgggtggagtgcaatgacacgatcttggctcactgcagcctcagcctcctgagtagctgagattacaggcatgggccaccacgcccagttgatttttgtatttttagtagagatggggtttcaccatgttggccaggctggtctcgaactcctgacctcaggcaatcttcccccttcggcctccaaaagtgctggaattaccgccgtgagccaccatgcccggccccatgtcaccctttccccagcctcctccaagctgccacaagcagtctcaaagctctctctgtgtctctcctctcagggaagatcctggtgcattgtgctgtgggcgtgagccgatccgccaccctggtactggcctacctcatgctgtaccaccaccttaccctcgtggaggccatcaagaaagtcaaagaccaccgaggcatcatccccaaccggggcttcctgaggcagctcctggccctggaccgcaggctgcggcagggtctggaagcatgaggggagggggagagaggtcaggccaggcccgtgggtaggtccctggctcccagctggagataggaggcccaggtggcaggtagcaggaggcccagatcacccatcctcccctggggtcaggagaggccgagccccaggccactgtcactctttgtgggaggggacggggagtgaggttgggcagtgtggtggatgggcacccaggaagggttgaccagggaaggaggcagctaggctgtagatggaagatggtcctgggattcgaacaccgctgggatctggccagggtgctccctgggattcacagtcccttcccctctttgtgcccaagtgtttccctctctccctcaccaaaacaaaagggccatctctgccctgcacttgtgcagaaagtcagggatacggcaagcatgaatgcaatggtgtagagttgtgtgaaacccctagcatagagacagacagcgaagagatggtgtgaaaagcttgcagaaccagacagagaaccccacagactttccactccaagcacaggaggaggtagctagcgtgtgagggttggcactaggcccacggctgctgcttgggccaaaaacatacagaggtgcatggctggcagtcttgaaattgtcactcgcttactggatccaagcgtctcgaggataaataaagatcatgaaaaagaa
